(19) United States
(12) Patent Application Publication
(10) Pub. No.: US 2023/0348528 A1
(43) Pub. Date: Nov. 2, 2023

(54) METHODS FOR PRODUCING AND/OR ENRICHING RECOMBINANT ANTIGEN-BINDING MOLECULES

(71) Applicant: Chugai Seiyaku Kabushiki Kaisha, Tokyo (JP)

(72) Inventor: Tatsuya KAWA, Shizuoka (JP)

(21) Appl. No.: 17/797,540

(22) PCT Filed: Feb. 5, 2021
(86) PCT No.: PCT/JP2021/004206

§ 371 Date: Aug. 4, 2022

(30) Foreign Application Priority Data
Feb. 5, 2020 (JP) 2020-017755

(51) Int. Cl. C07K 1/107

(52) U.S. Cl. CPC C07K 1/107; C07K 2317/624; C07K 2317/522

(57) ABSTRACT

An objective of the present invention is to provide novel antigen-binding molecules that have activity of regulating, e.g., interaction between antigen molecules. The present invention relates to antigen-binding molecules containing a first antigen-binding domain and a second antigen-binding domain which are capable of being linked with each other via at least one disulfide bond formed between the two antigen-binding domains, and methods for producing such antigen-binding molecules. More particularly, the invention relates to methods for increasing or enriching a preferred form of antibody proteins, and methods for eliminating disulfide heterogeneity of recombinant antibody proteins.

### TECHNICAL FIELD

[0001] The present invention relates to antigen-binding molecules containing a first antigen-binding domain and a second antigen-binding domain which are capable of being linked with each other via at least one disulfide bond formed between the two antigen-binding domains, and methods for producing such antigen-binding molecules. More particularly, the invention relates to methods for increasing or enriching a preferred form of antibody proteins, and methods for eliminating disulfide heterogeneity of recombinant antibody proteins.

### BACKGROUND ART

[0002] Antibodies are proteins which specifically bind to an antigen with high affinity. It is known that various molecules ranging from low-molecular compounds to proteins can be antigens. Since the technique for producing monoclonal antibodies was developed, antibody modification techniques have advanced, making it easy to obtain antibodies that recognize a particular molecule. Now the antibody modification techniques are not only for modifying proteins themselves, but have also expanded into a field that aims at addition of new functions where conjugation with low molecular compounds is contemplated. For example, cysteine-engineered antibodies, which contain a free cysteine amino acid in the heavy chain or light chain, are used as antibody-drug conjugates (ADCs) for medical purposes (PTL 1).

[0003] Antibodies are drawing attention as pharmaceuticals because they are highly stable in blood plasma and have less side effects. Not only do antibodies bind to an antigen and exhibit agonistic or antagonistic effects, but they also induce cytotoxic activity mediated by effector cells (also referred to as effector functions) including ADCC (Antibody Dependent Cell Cytotoxicity), ADCP (Antibody Dependent Cell Phagocytosis), and CDC (Complement Dependent Cytotoxicity). Taking advantage of these antibody functions, pharmaceuticals for cancer, immune diseases, chronic disease, infections, etc. have been developed (NPL 1).

[0004] For example, pharmaceuticals utilizing an agonist antibody against a costimulatory molecule promoting activation of cytotoxic T cells have been developed as anti-cancer agents (NPL 2). Recently, immune checkpoint-inhibiting antibodies with antagonist activity on co-inhibitory molecules were found to be useful as anticancer agents. This finding led to the launch of a series of antibody pharmaceuticals inhibiting the interaction of CTLA4/CD80 or PD-1/PD-L1: Ipilimumab, Nivolumab, Pembrolizumab, and Atezolizumab (NPL 1).

[0005] However, such antibodies sometimes do not sufficiently exert expected effects in their original native IgG form. Therefore, second generation antibody pharmaceuticals, in which the functions of the native IgG antibody have been artificially enhanced or added, or diminished or deleted, depending on the purpose of use, have been developed. The second generation antibody pharmaceuticals include, for example, antibodies with enhanced or deleted effector functions (NPL 3), antibodies binding to an antigen in an pH-dependent manner (NPL 4), and antibodies binding to two or more different antigens per molecule (antibodies binding to two different antigens are generally referred to as “bispecific antibodies”) (NPL 5).

[0006] Bispecific antibodies are expected to be more effective pharmaceuticals. For example, antibodies with enhanced antitumor activity which crosslink a cytotoxic T cell with a cancer cell by binding to a protein expressed on the cell membrane of the T cell as one antigen and to a cancer antigen as the other antigen have been developed (NPL 7, NPL 8, and PTL 2). The previously reported bispecific antibodies include molecules with two antibody Fab domains each having a different sequence (common light chain bispecific antibodies and hybrid hybridomas), molecules with an additional antigen-binding site attached to the N or C terminus of antibody (DVD-Ig and scFv-IgG), molecules with one Fab domain binding to two antigens (Two-in-one IgG), molecules in which the loop regions of the CH3 domain have been engineered to form new antigen-binding sites (Fcab) (NPL 9), and molecules with tandem Fab-Fab (NPL 10).

[0007] Meanwhile, antibodies with effector functions readily cause side effects by acting even on normal cells that express a target antigen at low levels. Thus, efforts have been made to allow antibody pharmaceuticals to exert their effector functions specifically on target tissue. Previously reported examples are antibodies whose binding activity changes upon binding to a cell metabolite (PTL 3), antibodies which become capable of binding to an antigen upon protease cleavage (PTL 4), and a technology that regulates antibody-mediated crosslinking between chimeric antigen receptor T cells and cancer cells by addition of a compound (ABT-737) (NPL 11).

[0008] Agonist antibodies may be difficult to obtain depending on the target. In particular, for membrane proteins such as G-protein-coupled receptors, many different techniques have been developed (NPL 12). Thus, there is a demand for simple methods for enhancing the agonistic effect of antibodies on such targets. Known existing methods include, for example, a method of crosslinking an anti-DR4 (Death Receptor 4) or anti-DR5 (Death Receptor 5) antibody (NPL13), a method of multimerizing nanobodies of anti-DR5 (Death Receptor 5) antibody (NPL 14), a method of converting an anti-thrombopoietin receptor antibody into a covalent diabody, sc(Fv)₂ (NPL 15), a method of changing the IgG subclass of anti-CD40 antibody (NPL 16), a method of hexamerizing an anti-CD20 antibody (NPL 17), and a method of producing a circular, antibody-like molecule (PTL 5). In addition, reported methods using bispecific antibodies include, for example, a method of using a combination of two appropriate anti-erythropoietin antibodies against different epitopes as a bispecific antibody (NPL 18), a method of using a combination of an antibody for guide functions and an antibody for effector functions as a bispecific antibody (NPL 19), and a method of introducing Cys residues into multiple antibody fragments specific for different epitopes and conjugating them (NPL 20, NPL 21, and PTL 6).

### CITATION LIST

### Patent Literature

[0009] [PTL 1] WO 2016/040856
[0010] [PTL 2] WO 2008/157379
[0011] [PTL 3] WO 2013/180200
[0012] [PTL 4] WO 2009/025846
[0013] [PTL 5] WO 2017/191101
[0014] [PTL 6] WO 2018/027204

### Non Patent Literature

[0015] [NPL 1] Nature Reviews Drug Discovery (2018) 17, 197-223
[0016] [NPL 2] Clinical and Experimental Immunology (2009) 157, 9-19
[0017] [NPL 3] Current Pharmaceutical Biotechnology (2016) 17, 1298-1314
[0018] [NPL 4] Nature Biotechnology (2010) 28, 1203-1208
[0019] [NPL 5] MAbs (2012) 4, 182-197
[0020] [NPL 6] Nature Reviews Immunology (2010) 10, 301-316
[0021] [NPL 7] Sci Transl Med (2017) 9(410), eaa14291
[0022] [NPL 8] Blood (2011) 117(17): 4403-4404
[0023] [NPL 9] Protein Eng Des Sel (2010) 23(4), 289-297
[0024] [NPL 10] J Immunol (2016) 196(7): 3199-3211
[0025] [NPL 11] Nature Chemical Biology (2018) 14, 112-117
[0026] [NPL 12] Exp Mol Med (2016) 48(2): e207
[0027] [NPL 13] Nature Reviews Drug Discovery (2008) 7, 1001-1012
[0028] [NPL 14] MAbs (2014) 6(6): 1560-1570
[0029] [NPL 15] Blood (2005) 105(2): 562-566
[0030] [NPL 16] J Biol Chem (2008) 283(23): 16206-16215
[0031] [NPL 17] PLoS Biol (2016) 14(1): e1002344
[0032] [NPL 18] Proc Natl Acad Sci USA (2012) 109(39): 15728-15733
[0033] [NPL 19] Scientific Reports (2018) 8, Article number: 766
[0034] [NPL 20] PLoS One (2012) 7(12): e51817
[0035] [NPL 21] Nucleic Acids Res (2010) 38(22): 8188-8195

### SUMMARY OF INVENTION

### Technical Problem

[0036] An objective of the present invention is to provide novel antigen-binding molecules (for example, an IgG antibody) that have activity of regulating interaction between two or more antigen molecules, and/or methods for producing or using such antigen-binding molecules. More particularly, the present invention solves the issues that conventional antibody (e.g. wild type IgG) has uncontrolled flexibility of the two antigen-binding domains (e.g. two Fab arms) by means of introducing one or more engineered disulfide bond(s) between the two antigen-binding domains (two Fabs) of the antibody through introducing mutation in the heavy and/or light chain. Specifically, by introducing one or more thiol-containing amino acid (e.g. cysteine and methionine) at each of the two antigen-binding domains (two Fabs) of the antibody, such antibody is capable of forming one or more disulfide bond between the two antigen-binding domains (two Fabs).

### Solution to Problem

[0037] An antigen-binding molecule of the present invention contains a first antigen-binding domain and a second antigen-binding domain which are “capable of being linked” with each other via at least one disulfide bond between the two antigen-binding domains. The at least one disulfide bond is “capable of being formed” between the two antigen-binding domains, e.g., between amino acid residues which are not in a hinge region. The terms “capable of being linked” and “capable of being formed” include cases where the disulfide bond has already been formed, and cases where the disulfide bond has not been formed but will be formed later under suitable conditions.

[0038] In one non-limiting aspect, the one or more engineered disulfide bond(s) between the two Fabs of the IgG antibody enables controls of the flexibility, the distance, and/or the cell binding orientation (i.e. cis or trans) of the two Fab arms, thereby improving activity, and/or safety of the IgG antibody compared to corresponding wild type IgG antibody without the one or more engineered disulfide bond(s). In one non-limiting aspect, the one or more engineered disulfide bond(s) between the two Fabs of the IgG improves the agonistic activity of the IgG antibody compared to corresponding wild type IgG antibody without the one or more engineered disulfide bond(s). In addition, in another non-limiting aspect, the one or more engineered disulfide bond(s) between the two Fabs of the IgG improves the resistance of the IgG antibody to protease digestion, compared to corresponding wild type IgG antibody without the one or more engineered disulfide bond(s).

[0039] While preparing the antibody capable of forming one or more engineered disulfide bond(s) between the two Fabs of the antibody, the inventors further found the several conformational isoforms of the same antibody (same sequence) but with different disulfide structures, in particular the isoform having the “paired cysteines” and the isoform having the “free or unpaired cysteines” (i.e., two structural isoforms), can be generated during recombinant antibody production in mammalian cell. Therefore, another aspect of the present invention is directed to providing efficient and facile production, purification and analysis of the antibody having one or more engineered disulfide bond(s) between the two Fabs of the antibody. More particularly, the invention describes methods for increasing structural homogeneity and relative abundance of the antibody in the “paired cysteines” form, i.e. having one or more engineered disulfide bond(s) formed between the two Fabs of the antibody. In other words, the invention describes methods for decreasing relative abundance of the antibody in the “free or unpaired cysteines” form, i.e. having no engineered disulfide bond formed between the two Fabs of the antibody.

[0040] As described in further detail hereinbelow, in some embodiments of the invention, the addition of reducing agent can facilitate the formation of one or more engineered disulfide bond(s) in the antibody and thus produce structurally homogeneous of the molecule.

[0041] More specifically, the present invention provides the following:
[0042] [1] A method for (i) producing an antibody preparation, (ii) purifying an antibody having a desired conformation, or (iii) improving homogeneity of an antibody preparation;
   [0043] said method comprising contacting an antibody preparation with a reducing reagent, wherein the antibody comprises a first antigen-binding domain and a second antigen-binding domain which are capable of being linked with each other via at least one disulfide bond, wherein said at least one disulfide bond is capable of being formed between amino acid residues which are not in a hinge region.
[0044] [2] A method for (i) producing an antibody preparation, (ii) purifying an antibody preparation, or (iii) improving homogeneity of an antibody preparation; comprising isolating a fraction of the antibody having a desired conformation via one or more chromatography steps selected from the group consisting of: reversed-phase chromatography, size-exclusion chromatography, ion-exchange chromatography, hydrophobic interaction chromatography, affinity chromatography, and electrophoresis; wherein said antibody having a desired conformation is characterized by having at least one disulfide bond formed between amino acid residues which are not in a hinge region.
[0045] [2A] The method of [2], wherein one or more chromatography steps is ion exchange chromatography (IEC) and/or hydrophobic interaction chromatography (HIC), or mixed-mode chromatography of IEC and HIC.
[0046] [3] The method of any one of [1]-[2A], wherein said antibody preparation comprises two or more structural isoforms which differ by at least one disulfide bond formed between amino acid residues which are not in a hinge region.
[0047] [3A] The method of [3], wherein said antibody preparation comprises two structural isoforms which differ by at least one disulfide bond formed between amino acid residues which are not in a hinge region.
[0048] [3B] The method of any one of [1] to [3A], wherein said method preferentially enriches or increases the population of an antibody structural isoform having at least one disulfide bond formed between amino acid residues which is not in a hinge region.
[0049] [3C] The method of any one of [1] to [3B], wherein said method produces a homogenous antibody preparation having at least 50%, 60%, 70%, 80%, 90%, preferably at least 95% molar ratio of said antibody having at least one disulfide bond formed between amino acid residues which are not in a hinge region.
[0050] [3D] The method of any one of [1] to [3C], wherein each of said first antigen-binding domain and second antigen-binding domain comprises a hinge region, or does not comprise a hinge region.
[0051] [3E] The method of any of [1] to [3D], wherein said amino acid residues which are not in a hinge region are introduced or engineered cysteines.
[0052] [3F] The method of any of [1] to [3E], wherein said at least one disulfide bond is an interchain disulfide bond.
[0053] [3I] The method of any of [1] to [3F], wherein said at least one disulfide bond is an engineered disulfide bond which is not present in a wild type IgG.
[0054] [4] The method of any of [1] to [3J],
   [0055] wherein said at least one disulfide bond is formed between a CH1 region, a CL region, a VL region, a VH region and/or a VHH region of the first antigen-binding domain and the second antigen-binding domain.
[0056] [5] The method of any of [1] to [4], wherein said at least one disulfide bond is formed between a CH1 region of the first antigen-binding domain and a CH1 region of the second antigen-binding domain.
[0057] [5.1] The method of [5], wherein said at least one disulfide bond is formed between the antigen-binding domains at any one of positions 119 to 123, 131 to 140, 148 to 150, 155 to 167, 174 to 178, 188 to 197, and 201 to 214, according to EU numbering, in the CH1 region.
[0058] [5.2] The method of [5], wherein said at least one disulfide bond is formed between the antigen-binding domains at any one of positions 119, 122, 123, 131, 132, 133, 134, 135, 136, 137, 138, 139, 140, 148, 150, 155, 156, 157, 159, 160, 161, 162, 163, 164, 165, 167, 174, 176, 177, 178, 188, 189, 190, 191, 192, 193, 194, 195, 196, 197, 201, 203, 205, 206, 207, 208, 211, 212, 213, 214, according to EU numbering, in the CH1 region.
[0059] [5.3] The method of [5], wherein said at least one disulfide bond is formed between the antigen-binding domains at any one of positions 134, 135, 136, 137, 191, 192, 193, 194, 195, or 196, according to EU numbering, in the CH1 region.
[0060] [5.4] The method of [5], wherein said at least one disulfide bond is formed between the antigen-binding domains at any one of positions 135, 136, or 191, according to EU numbering, in the CH1 region.
[0061] [5.5] The method of [5], wherein said at least one disulfide bond is formed between the amino acid residues in the first antigen-binding domain and the second antigen-binding domain, selected from the group consisting of positions 119, 120, 121, 122, and 123 according to EU numbering.
[0062] [5.6] The method of [5], wherein said at least one disulfide bond is formed between the amino acid residues in the first antigen-binding domain and the second antigen-binding domain, selected from the group consisting of positions 131, 132, 133, 134, 135, 136, 137, 138, 139, and 140 according to EU numbering.
[0063] [5.7] The method of [5], wherein said at least one disulfide bond is formed between the amino acid residues in the first antigen-binding domain and the second antigen-binding domain, selected from the group consisting of positions 148, 149, and 150 according to EU numbering.
[0064] [5.8] The method of [5], wherein said at least one disulfide bond is formed between the amino acid residues in the first antigen-binding domain and the second antigen-binding domain, selected from the group consisting of positions 155, 156, 157, 158, 159, 160, 161, 162, 163, 164, 165, 166, and 167 according to EU numbering.
[0065] [5.9] The method of [5], wherein said at least one disulfide bond is formed between the amino acid residues in the first antigen-binding domain and the second antigen-binding domain, selected from the group consisting of positions 174, 175, 176, 177, and 178 according to EU numbering.
[0066] [5.10] The method of [5], wherein said at least one disulfide bond is formed between the amino acid residues in the first antigen-binding domain and the second antigen-binding domain, selected from the group consisting of positions 188, 189, 190, 191, 192, 193, 194, 195, 196, and 197 according to EU numbering.
[0067] [5.11] The method of [5], wherein said at least one disulfide bond is formed between the amino acid residues in the first antigen-binding domain and the second antigen-binding domain, selected from the group consisting of positions 201, 202, 203, 204, 205, 206, 207, 208, 209, 210, 211, 212, 213, and 214 according to EU numbering.
[0068] [5.12] The method of [5], wherein the difference between the positions of the amino acid residues in the first antigen-binding domain and the second antigen-binding domain is three amino acids or less.
[0069] [5.13] The method of [5], wherein said at least one of the disulfide bonds linking the two antigen-binding domains is formed by linking an amino acid residue at position 135 according to EU numbering in the CH1 region of the first antigen-binding domain with an amino acid residue at any one of positions 132 to 138 according to EU numbering in the CH1 region of the second antigen-binding domain.
[0070] [5.14] The method of [5], wherein said at least one of the disulfide bonds linking the two antigen-binding domains is formed by linking an amino acid residue at position 136 according to EU numbering in the CH1 region of the first antigen-binding domain with an amino acid residue at any one of positions 133 to 139 according to EU numbering in the CH1 region of the second antigen-binding domain.
[0071] [5.15] The method of [5], wherein said at least one of the disulfide bonds linking the two antigen-binding domains is formed by linking an amino acid residue at position 191 according to EU numbering in the CH1 region of the first antigen-binding domain with an amino acid residue at any one of positions 188 to 194 according to EU numbering in the CH1 region of the second antigen-binding domain.
[0072] [5.16] The method of [5], wherein one disulfide bond is formed between the two antigen-binding domains at position 135, according to EU numbering, in the CH1 region.
[0073] [5.17] The method of [5], wherein one disulfide bond is formed between the two antigen-binding domains at position 136, according to EU numbering, in the CH1 region.
[0074] [5.18] The method of [5], wherein one disulfide bond is formed between the two antigen-binding domains at position 191, according to EU numbering, in the CH1 region.
[0075] [5A] The method of [5], wherein the subclass of the CH1 region is gamma 1, gamma 2, gamma 3, gamma 4, alpha 1, alpha 2, mu, delta, or epsilon.
[0076] [6] The method of [5]-[5A], wherein one disulfide bond is formed between the amino acid residues at position 191 according to EU numbering in the respective CH1 regions of the first antigen-binding domain and the second antigen-binding domain.
[0077] [6A] The method of [6], wherein additional one, two or more disulfide bond(s) is/are formed between the first antigen-binding domain and the second antigen-binding domain via the amino acid residues at the following positions according to EU numbering in each of the respective CH1 regions of the first antigen-binding domain and the second antigen-binding domain:
   [0078] (a) between amino acid residues at any position of 131 to 138, 194 and 195 in each of the two antigen-binding domains;
   [0079] (b) between the amino acid residues at position 131 in each of the two antigen-binding domains, and between the amino acid residues at position 194 in each of the two antigen-binding domains;
   [0080] (c) between the amino acid residues at position 132 in each of the two antigen-binding domains, and between the amino acid residues at position 194 in each of the two antigen-binding domains;
   [0081] (d) between the amino acid residues at position 133 in each of the two antigen-binding domains, and between the amino acid residues at position 194 in each of the two antigen-binding domains;
   [0082] (e) between the amino acid residues at position 134 in each of the two antigen-binding domains, and between the amino acid residues at position 194 in each of the two antigen-binding domains;
   [0083] (f) between the amino acid residues at position 135 in each of the two antigen-binding domains, and between the amino acid residues at position 194 in each of the two antigen-binding domains;
   [0084] (g) between the amino acid residues at position 136 in each of the two antigen-binding domains, and between the amino acid residues at position 194 in each of the two antigen-binding domains;
   [0085] (h) between the amino acid residues at position 137 in each of the two antigen-binding domains, and between the amino acid residues at position 194 in each of the two antigen-binding domains;
   [0086] (i) between the amino acid residues at position 138 in each of the two antigen-binding domains, and between the amino acid residues at position 194 in each of the two antigen-binding domains;
   [0087] (j) between the amino acid residues at position 131 in each of the two antigen-binding domains, and between the amino acid residues at position 195 in each of the two antigen-binding domains;
   [0088] (k) between the amino acid residues at position 132 in each of the two antigen-binding domains, and between the amino acid residues at position 195 in each of the two antigen-binding domains;
   [0089] (l) between the amino acid residues at position 133 in each of the two antigen-binding domains, and between the amino acid residues at position 195 in each of the two antigen-binding domains;
   [0090] (m) between the amino acid residues at position 134 in each of the two antigen-binding domains, and between the amino acid residues at position 195 in each of the two antigen-binding domains;
   [0091] (n) between the amino acid residues at position 135 in each of the two antigen-binding domains, and between the amino acid residues at position 195 in each of the two antigen-binding domains;
   [0092] (o) between the amino acid residues at position 136 in each of the two antigen-binding domains, and between the amino acid residues at position 195 in each of the two antigen-binding domains;
   [0093] (p) between the amino acid residues at position 137 in each of the two antigen-binding domains, and between the amino acid residues at position 195 in each of the two antigen-binding domains; and
   [0094] (q) between the amino acid residues at position 138 in each of the two antigen-binding domains, and between the amino acid residues at position 195 in each of the two antigen-binding domains.
[0095] [6B] The method of [6] or [6A], wherein any one of the first and second antigen-binding domains comprises one, two or more charged amino acid residues at position 136-138 (according to EU numbering) in the respective CH1 region; and the other antigen-binding domain of the first and second antigen-binding domains comprises one, two or more oppositely charged amino acid residues at position 193-195 (according to EU numbering) in the respective CH1 region.
[0096] [6C] The method of [6] or [6A], wherein any one of the first and second antigen-binding domains comprises one, two or more positively charged amino acid residues at position 136-138 (according to EU numbering) in the respective CH1 region; and the other antigen-binding domain out of the first and second antigen-binding domains comprises one, two or more negatively charged amino acid residues at position 193-195 (according to EU numbering) in the respective CH1 region.
[0097] [6D] The method of [6] or [6A], wherein any one of the first and second antigen-binding domains comprises one, two or more negatively charged amino acid residues at position 136-138 (according to EU numbering) in the respective CH1 region; and the other antigen-binding domain out of the first and second antigen-binding domains comprises one, two or more positively charged amino acid residues at position 193-195 (according to EU numbering) in the respective CH1 region.
[0098] [6E] The method of [6] or [6A], wherein any one of the first and second antigen-binding domains comprises one, two or more of the following amino acid residues in the respective CH1 region (according to EU numbering):
   [0099] (a) the amino acid residue at position 136 is glutamic acid (E) or aspartic acid (D);
   [0100] (b) the amino acid residue at position 137 is glutamic acid (E) or aspartic acid (D);
   [0101] (c) the amino acid residue at position 138 is glutamic acid (E) or aspartic acid (D); and the other antigen-binding domain of the first and second antigen-binding domains comprises one, two or more of the following amino acid residues in the respective CH1 region (according to EU numbering):
   [0102] (d) the amino acid residue at position 193 is lysine (K), arginine (R), or histidine (H);
   [0103] (e) the amino acid residue at position 194 is lysine (K), arginine (R), or histidine (H); and
   [0104] (f) the amino acid residue at position 195 is lysine (K), arginine (R), or histidine (H).
[0105] [6F-1] The method of [6] or [6A], wherein any one of the first and second antigen-binding domains comprises one or more of the following amino acid residues in the respective CH1 region (according to EU numbering):
   [0106] (a) the amino acid residue at position 136 is lysine (K), arginine (R), or histidine (H);
   [0107] (b) the amino acid residue at position 137 is lysine (K), arginine (R), or histidine (H);
   [0108] (c) the amino acid residue at position 138 is lysine (K), arginine (R), or histidine (H); and the other antigen-binding domain out of the first and second antigen-binding domains comprises one or more of the following amino acid residues in the respective CH1 region (according to EU numbering):
   [0109] (d) the amino acid residue at position 193 is glutamic acid (E) or aspartic acid (D);
   [0110] (e) the amino acid residue at position 194 is glutamic acid (E) or aspartic acid (D); and
   [0111] (f) the amino acid residue at position 195 is glutamic acid (E) or aspartic acid (D).
[0112] [6F-2] The method of [6] or [6A], wherein each of the first and second antigen-binding domains comprises any of the specific charged mutation combination in the respective CH1 region (according to EU numbering) as listed in Tables 7, Table 82 or Table 85.
[0113] [6G] The method of [6] or [6A], wherein any one of the first and second antigen-binding domains comprises one, two or more hydrophobic amino acid residues at position 136-138 (according to EU numbering) in the respective CH1 region; and the other antigen-binding domain out of the first and second antigen-binding domains comprises one, two or more hydrophobic amino acid residues at position 193-195 (according to EU numbering) in the respective CH1 region.
[0114] [6H] The method of [6G], wherein said hydrophobic amino acid residue(s) is/are alanine (Ala), valine (Val), leucine (Leu), isoleucine (Ile), phenylalanine (Phe), and/or tryptophan (Trp).
[0115] [6I] The method of [6] or [6A], wherein any one of the first and second antigen-binding domains comprises one “knob” amino acid residues at position 136-138 (according to EU numbering) in the respective CH1 region; and the other antigen-binding domain out of the first and second antigen-binding domains comprises one, two or more “hole” amino acid residues at position 193-195 (according to EU numbering) in the respective CH1 region.
[0116] [6J] The method of [6] or [6A], wherein any one of the first and second antigen-binding domains comprises one, two or more “hole” amino acid residues at position 136-138 (according to EU numbering) in the respective CH1 region; and the other antigen-binding domain out of the first and second antigen-binding domains comprises one “knob” amino acid residues at position 193-195 (according to EU numbering) in the respective CH1 region.
[0117] [6K] The method of [6I] or [6J], wherein said “knob” amino acid residue(s) is/are selected from the group consisting of tryptophan (Trp) and phenylalanine (Phe); and said “hole” amino acid residue(s) is/are selected from the group consisting of alanine (Ala), valine (Val), threonine (T) or serine (S).
[0118] [6L] The method of [6] or [6A], wherein any one of the first and second antigen-binding domains comprises one, two or more aromatic amino acid residues at position 136-138 (according to EU numbering) in the respective CH1 region; and the other antigen-binding domain out of the first and second antigen-binding domains comprises one, two or more positively charged amino acid residues at position 193-195 (according to EU numbering) in the respective CH1 region.
[0119] [6M] The method of [6] or [6A], wherein any one of the first and second antigen-binding domains comprises one, two or more positively charged amino acid residues at position 136-138 (according to EU numbering) in the respective CH1 region; and the other antigen-binding domain out of the first and second antigen-binding domains comprises one, two or more aromatic amino acid residues at position 193-195 (according to EU numbering) in the respective CH1 region.
[0120] [6N-1] The method of [6L] or [6M], wherein said aromatic amino acid residue(s) is/are selected from the group consisting of tryptophan (Trp), tyrosine (Tyr), histidine (His), and phenylalanine (Phe); and said positively charged amino acid residue(s) is/are selected from the group consisting of lysine (K), arginine (R), or histidine (H).
[0121] [6N-2] The method of [6] or [6A], wherein each of the first and second antigen-binding domains comprises any of the specific hydrophobic amino acid mutation combination in the respective CH1 region (according to EU numbering) as listed in Table 10.
[0122] [7] The method of any one of [1] to [4], wherein said at least one disulfide bond is formed between a CL region of the first antigen-binding domain and a CL region of the second antigen-binding domain.
[0123] [7.1] The method of [7], wherein the amino acid residue from which the at least one disulfide bond between the two antigen-binding domains is formed is present at any one of positions 108 to 112, 121 to 128, 151 to 156, 184 to 190, 195 to 196, 200 to 203, and 208 to 213, according to Kabat numbering, in the CL region.
[0124] [7.2] The method of [7], wherein the amino acid residue from which the at least one disulfide bond between the two antigen-binding domains is formed is present at a position selected from the group consisting of positions 108, 109, 112, 121, 123, 126, 128, 151, 152, 153, 156, 184, 186, 188, 189, 190, 195, 196, 200, 201, 202, 203, 208, 210, 211, 212, and 213 according to Kabat numbering in the CL region.
[0125] [7.3] The method of [7], wherein the amino acid residue from which the at least one disulfide bonds between the two antigen-binding domains is formed is present at position 126 according to Kabat numbering in the CL region.
[0126] [7.4] The method of [7], wherein at least one of the disulfide bonds linking the two antigen-binding domains is formed by linking an amino acid residue in the CL region of the first antigen-binding domain with an amino acid residue in the CL region of the second antigen-binding domain.
[0127] [7.5] The method of [7], wherein the amino acid residue from which the at least one disulfide bond between the two antigen-binding domains is formed is present at a position independently selected from the group consisting of positions 108, 109, 110, 111, and 112 according to Kabat numbering.
[0128] [7.6] The method of [7], wherein the amino acid residue from which the at least one disulfide bond between the two antigen-binding domains is formed is present at a position independently selected from the group consisting of positions 151, 152, 153, 154, 155, and 156 according to Kabat numbering.
[0129] [7.7] The method of [7], wherein the amino acid residue from which the at least one disulfide bond between the two antigen-binding domains is formed is present at a position independently selected from the group consisting of positions 184, 185, 186, 187, 188, 189, and 190 according to Kabat numbering.
[0130] [7.8] The method of [7], wherein the amino acid residue from which the at least one disulfide bond between the two antigen-binding domains is formed is present at a position independently selected from the group consisting of positions 200, 201, 202, and 203 according to Kabat numbering.
[0131] [7.9] The method of [7], wherein the amino acid residue from which the at least one disulfide bond between the two antigen-binding domains is formed is present at a position independently selected from the group consisting of positions 208, 209, 210, 211, 212, and 213 according to Kabat numbering.
[0132] [7.10] The method of [7] to [7.9], wherein the difference between the positions of the amino acid residues from which the at least one disulfide bond between the two antigen-binding domains is formed is three amino acids or less.
[0133] [7.11] The method of [7], wherein said at least one of the bonds linking the two antigen-binding domains is formed by linking amino acid residues at position 126 according to Kabat numbering in the CL region of the two antigen-binding domains with each other.
[0134] [8] The method of any one of [1] to [4], wherein said at least one of the disulfide bond is formed by linking an amino acid residue in a CH1 region of the first antigen-binding domain with an amino acid residue in a CL region of the second antigen-binding domain.
[0135] [8.1] The method of [8], wherein the amino acid residue in the CH1 region is selected from the group consisting of positions 188, 189, 190, 191, 192, 193, 194, 195, 196, and 197 according to EU numbering, and the amino acid residue in the CL region is selected from the group consisting of positions 121, 122, 123, 124, 125, 126, 127, and 128 according to Kabat numbering.
[0136] [8.2] The method of [8], wherein at least one of the disulfide bond linking the two antigen-binding domains is formed by linking an amino acid residue at position 191 according to EU numbering in the CH1 region of the first antigen-binding domain with an amino acid residue at position 126 according to Kabat numbering in the CL region of the second antigen-binding domain.
[0137] [8A] The method of [7] to [8], wherein the subclass of the CL region is kappa or lambda.
[0138] [9] The method of any one of [1] to [4], wherein said at least one disulfide bond is formed between a variable region of the first antigen-binding domain and the second antigen-binding domain.
[0139] [9.1] The method of [9], wherein the amino acid residue from which the at least one disulfide bond between the antigen-binding domains is formed is present within a VH region.
[0140] [9.2] The method of [9], wherein the amino acid residue from which the at least one disulfide bond between the antigen-binding domains is formed is present at a position selected from the group consisting of positions 6, 8, 16, 20, 25, 26, 28, 74, and 82b according to Kabat numbering in the VH region.
[0141] [9.3] The method of [9], wherein the amino acid residue from which the at least one disulfide bond between the antigen-binding domains is formed is present within a VL region.
[0142] [9.4] The method of [9], wherein the amino acid residue from which the at least one disulfide bond between the antigen-binding domains is formed is present at a position selected from the group consisting of positions 21, 27, 58, 77, 100, 105, and 107 according to Kabat numbering in the VL region (subclass kappa).
[0143] [9.5] The method of [9], wherein the amino acid residue from which the at least one disulfide bond between the antigen-binding domains is formed is present at a position selected from the group consisting of positions 6, 19, 33, and 34 according to Kabat numbering in the VL region (subclass lambda).
[0144] [9A] The method of [4], wherein the amino acid residue from which the at least one disulfide bond between the two antigen-binding domains is formed is present within a VHH region.
[0145] [9B] The method of [9A], wherein the amino acid residue from which the at least one disulfide bond between the antigen-binding domains is formed is present at a position selected from the group consisting of positions 4, 6, 7, 8, 9, 10, 11, 12, 14, 15, 17, 20, 24, 27, 29, 38, 39, 40, 41, 43, 44, 45, 46, 47, 48, 49, 67, 69, 71, 78, 80, 82, 82c, 85, 88, 91, 93, 94, and 107 according to Kabat numbering in the VHH region.
[0146] [10] The method of any one of [1] to [9B], characterized by one or more of the following:
   [0147] (a) wherein said at least one disulfide bond restricts the antigen binding orientation of the two antigen-binding domains to cis antigen-binding (i.e. binding to two antigens on the same cell), or restrict binding of the two antigen binding domains to two antigens which are spatially close to each other;
   [0148] (b) wherein said at least one disulfide bond holds the first antigen-binding domain and the second antigen-binding domain spatially closer to each other, as compared to a same corresponding antibody which does not have said at least one disulfide bond;
   [0149] (c) wherein said at least one disulfide bond reduce the flexibility and/or mobility of first antigen-binding domain and the second antigen-binding domain, as compared to a corresponding same antibody which does not have said at least one disulfide bond;
   [0150] (d) wherein said at least one disulfide bond increases resistance of the antibody to protease cleavage, as compared to a corresponding same antibody which does not have said at least one disulfide bond;
   [0151] (e) wherein said at least one disulfide bond enhances or reduces interaction between two antigen molecules bound by the antigen-binding molecule, as compared to a corresponding same antibody which does not have said at least one disulfide bond;
   [0152] (f) wherein said method produces an antibody preparation which is more homogeneous than the same antibody preparation that has not been treated by said method;
   [0153] (g) wherein said method produces an antibody preparation having increase in its biological activity compared to the same antibody that has not been treated by said method;
   [0154] (h) wherein said method produces an antibody having enhanced activity of holding two antigen molecules at spatially close positions compared to the same antibody that has not been treated by said method;
   [0155] (i) wherein said method produces an antibody having enhanced stability compared to the same antibody that has not been treated by said method; and
   [0156] (j) wherein said method preferentially enriches an antibody having at least one disulfide bond formed outside of hinge regions and said preferentially enriched form has a pharmaceutically desirable property selected from any of (a) to (i) above, as compared to a preparation that has not been treated by said method.
[0157] [11] The method of any one of [1] to [10], wherein each of the first and second antigen-binding domains has a Fab, Fab′, scFab, Fv, scFv, or VHH structure.
[0158] [11A] The method of [11], wherein the first and second antigen-binding domains each comprises a Fab and a hinge region, forming a F(ab′)2 structure.
[0159] [12] The method of any one of [1] to [11A], wherein the antigen-binding molecule further comprises an Fc region.
[0160] [12A] The method of [12], wherein the Fc region is a Fc region having reduced binding activity against Fc gamma R as compared with that of the Fc region of a wild-type human IgG1 antibody.
[0161] [13] The method of any one of [1] to [12A], wherein said antibody is an IgG antibody, preferably an IgG1, IgG2, IgG3 or IgG4 antibody.
[0162] [14] The method of any one of [1] to [13], wherein both the first and second antigen-binding domains bind to the same antigen.
[0163] [14A] The method of any one of [1] to [13], wherein both the first and second antigen-binding domains bind to the same epitope on said antigen.
[0164] [14B] The method of any one of [1] to [13], wherein each of the first and second antigen-binding domains binds to a different epitope on said antigen.
[0165] [14C] The method of any one of [1] to [13], wherein each of the first and second antigen-binding domains binds to a different antigen.
[0166] [14D] The method of any one of [1] to [13], wherein both the first and second antigen-binding domains have the same amino acid sequence.
[0167] [14E] The method of any one of [1] to [13], wherein each of the first and second antigen-binding domains has a different amino acid sequence.
[0168] [14F] The method of any one of [1] to [14E], wherein at least one of two antigens to which the first and second antigen-binding domains bind is a soluble protein.
[0169] [14G] The method of any one of [1] to [14E], wherein at least one of two antigens to which the first and second antigen-binding domains bind is a membrane protein.
[0170] [14H] The method of any one of [1] to [14G], which has activity of regulating interaction between two antigen molecules.
[0171] [14I] The method of [14H], which is capable of enhancing or diminishing interaction between two antigen molecules as compared to a same corresponding antibody which does not have said at least one disulfide bond.
[0172] [14J] The method of any one of [14H] to [14I], wherein the two antigen molecules are a ligand and a receptor thereof, respectively, and wherein the antibody has activity of promoting activation of the receptor by the ligand.
[0173] [14K] The method of any one of [14H] to [14I], wherein the two antigen molecules are an enzyme and a substrate thereof, respectively, and wherein the antigen-binding molecule has activity of promoting catalytic reaction of the enzyme with the substrate.
[0174] [14L] The method of any one of [14H] to [14I], wherein both of the two antigen molecules are proteins present on cellular surfaces, and wherein the antibody has activity of promoting interaction between a cell expressing the first antigen and a cell expressing the second antigen.
[0175] [14M] The method of any of [14L], wherein the cell expressing the first antigen is a cell with cytotoxic activity, and the cell expressing the second antigen is a target cell thereof, and wherein the antibody promotes damage of said target cell by said cell with cytotoxic activity.
[0176] [14N] The method of [14M], wherein the cell with cytotoxic activity is a T cell, NK cell, monocyte, or macrophage.
[0177] [14O] The method of [14N], wherein the antibody having said at least one disulfide bond enhances or diminishes activation of two antigen molecules as compared to a same corresponding antibody which does not have said at least one disulfide bond.
[0178] [14P] The method of any one of [14] to [14O], wherein the antigen molecules are selected from the group consisting of receptors belonging to cytokine receptor superfamilies, G protein-coupled receptors, ion channel receptors, tyrosine kinase receptors, immune checkpoint receptors, antigen receptors, CD antigens, costimulatory molecules, and cell adhesion molecules.
[0179] [15] The method of any one of [14] to [14P], wherein the first antigen-binding domain and the second antigen-binding domain are each capable of binding to CD3.
[0180] [16] The method of any one of [1] to [15], wherein the pH of said reducing reagent contacting with the antibody is from about 3 to about 10.
[0181] [16A] The method of [16], wherein the pH of said reducing reagent contacting with the antibody is about 6, 7 or 8.
[0182] [16B] The method of [16], wherein the pH of said reducing reagent contacting with the antibody is about 7.
[0183] [16C] The method of [16], wherein the pH of said reducing reagent contacting with the antibody is about 3.
[0184] [17] The method of any one of [1] to [16B], wherein the reducing agent is selected from the group consisting of TCEP, 2-MEA, DTT, Cysteine, GSH and Na2SO3.
[0185] [17A] The method of [17], wherein the reducing agent is TCEP.
[0186] [18] The method of any one of [17] to [17A], wherein the concentration of the reducing agent is from about 0.01 mM to about 100 mM.
[0187] [19] The method of [18], wherein the concentration of the reducing agent is about 0.01, 0.05, 0.1, 0.25, 0.5, 1, 2.5, 5, 10, 25, 50, 100 mM, preferably about 0.01 mM to 25 mM.
[0188] [20] The method of any one of [1] to [19], wherein the contacting step is performed for at least 30 minutes.
[0189] [20A] The method of any one of [1] to [19], wherein the contacting step is performed for about 2 to about 48 hours.
[0190] [20B] The method of any one of [1] to [19], wherein the contacting step is performed for about 2 hours or about 16 hours.
[0191] [21] The method of any one of [1] to [20B], wherein the contacting step is performed at a temperature of about 20 degrees C. to 37 degrees C., preferably at 23 degrees C., 25 degrees C. or 37 degrees C., more preferably at 23 degrees C.
[0192] [22] The method of any one of [1] to [21], wherein said antibody is at least partially purified prior to said contacting step with reducing agent.
[0193] [22A] The method of [22], wherein said antibody is partially purified by affinity chromatography (preferably Protein A chromatography) prior to said contacting.
[0194] [23] The method of any one of [1] to [22], wherein the concentration of the antibody is from about 1 mg/ml and about 50 mg/ml.
[0195] [23A] The method of [23], wherein the concentration of the antibody is about 1 mg/ml or about 20 mg/ml.
[0196] [24] The method of any one of [1] to [23], further comprising isolating a fraction of the contacted antibody having a desired conformation.
[0197] [24A] The method of [24], wherein the procedure for said isolating is selected from the group consisting of: reversed-phase chromatography HPLC, size-exclusion chromatography, ion-exchange chromatography, hydrophobic interaction chromatography, affinity chromatography, dialysis and electrophoresis.
[0198] [24B] The method of [24], wherein the procedure for said isolating is ion exchange chromatography (IEC) and/or hydrophobic interaction chromatography (HIC).
[0199] [24C] The method of any one of [1] to [24B], further comprising a step of removing the reducing agent, preferably by dialysis, more preferably by a chromatography method.
[0200] [25] A preparation of an IgG antibody prepared according to the method of any one of [1] to [24B], said preparation having a homogeneous population of said IgG antibody having at least one disulfide bond outside of the hinge regions.
[0201] [26] A preparation of an IgG antibody prepared according to the method of any one of [1] to [25], said preparation having at least 50%, 60%, 70%, 80%, 90%, preferably at least 95% molar ratio of said IgG antibody having at least one disulfide bond outside of the hinge regions.
[0202] [27] The preparation of [25] or [26], further comprising a pharmaceutically acceptable carrier, excipient or diluent.
[0203] [28] A pharmaceutical composition comprising a homogeneous population of antibody as defined in [25] and a pharmaceutically acceptable carrier, excipient or diluent.

[0204] In another aspect, the present invention also provides the following:
[0205] [1] An antigen-binding molecule comprising a first antigen-binding domain and a second antigen-binding domain, wherein the two antigen-binding domains are linked with each other via one or more bonds.
[0206] [2] The antigen-binding molecule of [1], wherein at least one of the bonds linking the two antigen-binding domains is a covalent bond.
[0207] [3] The antigen-binding molecule of [2], wherein the covalent bond is formed by direct crosslinking of an amino acid residue in the first antigen-binding domain with an amino acid residue in the second antigen-binding domain.
[0208] [4] The antigen-binding molecule of [3], wherein the crosslinked amino acid residues are cysteine.
[0209] [5] The antigen-binding molecule of [4], wherein the formed covalent bond is a disulfide bond.
[0210] [6] The antigen-binding molecule of [2], wherein the covalent bond is formed by crosslinking of an amino acid residue in the first antigen-binding domain with an amino acid residue in the second antigen-binding domain via a crosslinking agent.
[0211] [7] The antigen-binding molecule of [6], wherein the crosslinking agent is an amine-reactive crosslinking agent.
[0212] [8] The antigen-binding molecule of [7], wherein the crosslinked amino acid residues are lysine.
[0213] [9] The antigen-binding molecule of [1], wherein at least one of the bonds linking the two antigen-binding domains is a noncovalent bond.
[0214] [10] The antigen-binding molecule of [9], wherein the noncovalent bond is an ionic bond, hydrogen bond, or hydrophobic bond.
[0215] [11] The antigen-binding molecule of [10], wherein the ionic bond is formed between an acidic amino acid and a basic amino acid.
[0216] [12] The antigen-binding molecule of [11], wherein the acidic amino acid is aspartic acid (Asp) or glutamic acid (Glu), and the basic amino acid is histidine (His), lysine (Lys), or arginine (Arg).
[0217] [13] The antigen-binding molecule of any one of [1] to [12], wherein at least one of amino acid residues from which the bonds between the antigen-binding domains originate is an artificially-introduced mutated amino acid residue.
[0218] [14] The antigen-binding molecule of [13], wherein the mutated amino acid residue is a cysteine residue.
[0219] [15] The antigen-binding molecule of any one of [1] to [14], wherein at least one of the first and second antigen-binding domains has, by itself, activity of binding to an antigen.
[0220] [16] The antigen-binding molecule of any one of [1] to [15], wherein the first and second antigen-binding domains are both antigen-binding domains of the same type.
[0221] [17] The antigen-binding molecule of any one of [1] to [16], wherein at least one of the bonds linking the two antigen-binding domains is formed by linking amino acid residues present at the same position on the first antigen-binding domain and the second antigen-binding domain with each other.
[0222] [18] The antigen-binding molecule of any one of [1] to [16], wherein at least one of the bonds linking the two antigen-binding domains is formed by linking amino acid residues present at different positions on the first antigen-binding domain and the second antigen-binding domain with each other.
[0223] [19] The antigen-binding molecule of any one of [1] to [18], wherein at least one of the first and second antigen-binding domains comprises an antibody fragment which binds to a particular antigen.
[0224] [20] The antigen-binding molecule of [19], wherein the antibody fragment is a Fab, Fab′, scFab, Fv, scFv, or single domain antibody.
[0225] [21] The antigen-binding molecule of [19] or [20], wherein at least one of amino acid residues from which the bonds between the antigen-binding domains originate is present within the antibody fragment.
[0226] [22] The antigen-binding molecule of [21], wherein the amino acid residue from which the bonds between the antigen-binding domains originate is present within a constant region.
[0227] [23] The antigen-binding molecule of [22], wherein the constant region is derived from human.
[0228] [24] The antigen-binding molecule of [22] or [23], wherein the amino acid residue from which the bonds between the antigen-binding domains originate is present within a CH1 region.
[0229] [25] The antigen-binding molecule of [24], wherein the subclass of the CH1 region is gamma 1, gamma 2, gamma 3, gamma 4, alpha 1, alpha 2, mu, delta, or epsilon.
[0230] [26] The antigen-binding molecule of [24] or [25], wherein the amino acid residue from which the bonds between the antigen-binding domains originate is present at any one of positions 119 to 123, 131 to 140, 148 to 150, 155 to 167, 174 to 178, 188 to 197, 201 to 214, and 218 to 219, according to EU numbering, in the CH1 region.
[0231] [27] The antigen-binding molecule of [26], wherein the amino acid residue from which the bonds between the antigen-binding domains originate is present at a position selected from the group consisting of positions 119, 122, 123, 131, 132, 133, 134, 135, 136, 137, 138, 139, 140, 148, 150, 155, 156, 157, 159, 160, 161, 162, 163, 164, 165, 167, 174, 176, 177, 178, 188, 189, 190, 191, 192, 193, 194, 195, 196, 197, 201, 203, 205, 206, 207, 208, 211, 212, 213, 214, 218, and 219, according to EU numbering, in the CH1 region.
[0232] [28] The antigen binding molecule of [27], wherein the amino acid residue from which the bonds between the antigen-binding domains originate is present at position 134, 135, 136, 137, 191, 192, 193, 194, 195, or 196, according to EU numbering, in the CH1 region.
[0233] [29] The antigen binding molecule of [28], wherein the amino acid residue from which the bonds between the antigen-binding domains originate is present at position 135, 136, or 191, according to EU numbering, in the CH1 region.
[0234] [30] The antigen binding molecule of any one of [24] to [29], wherein at least one of the bonds linking the two antigen-binding domains is formed by linking an amino acid residue in the CH1 region of the first antigen-binding domain with an amino acid residue in the CH1 region of the second antigen-binding domain.
[0235] [31] The antigen binding molecule of [30], wherein the amino acid residues in the first antigen-binding domain and the second antigen-binding domain are each independently selected from the group consisting of positions 119, 120, 121, 122, and 123 according to EU numbering.
[0236] [32] The antigen binding molecule of [30], wherein the amino acid residues in the first antigen-binding domain and the second antigen-binding domain are each independently selected from the group consisting of positions 131, 132, 133, 134, 135, 136, 137, 138, 139, and 140 according to EU numbering.
[0237] [33] The antigen binding molecule of [30], wherein the amino acid residues in the first antigen-binding domain and the second antigen-binding domain are each independently selected from the group consisting of positions 148, 149, and 150 according to EU numbering.
[0238] [34] The antigen binding molecule of [30], wherein the amino acid residues in the first antigen-binding domain and the second antigen-binding domain are each independently selected from the group consisting of positions 155, 156, 157, 158, 159, 160, 161, 162, 163, 164, 165, 166, and 167 according to EU numbering.
[0239] [35] The antigen binding molecule of [30], wherein the amino acid residues in the first antigen-binding domain and the second antigen-binding domain are each independently selected from the group consisting of positions 174, 175, 176, 177, and 178 according to EU numbering.
[0240] [36] The antigen binding molecule of [30], wherein the amino acid residues in the first antigen-binding domain and the second antigen-binding domain are each independently selected from the group consisting of positions 188, 189, 190, 191, 192, 193, 194, 195, 196, and 197 according to EU numbering.
[0241] [37] The antigen binding molecule of [30], wherein the amino acid residues in the first antigen-binding domain and the second antigen-binding domain are each independently selected from the group consisting of positions 201, 202, 203, 204, 205, 206, 207, 208, 209, 210, 211, 212, 213, and 214 according to EU numbering.
[0242] [38] The antigen binding molecule of [30], wherein the amino acid residues in the first antigen-binding domain and the second antigen-binding domain are each independently selected from the group consisting of positions 218 and 219 according to EU numbering.
[0243] [39] The antigen binding molecule of any one of [30] to [38], wherein the difference between the positions of the amino acid residues in the first antigen-binding domain and the second antigen-binding domain is three amino acids or less.
[0244] [40] The antigen-binding molecule of [39], wherein at least one of the bonds linking the two antigen-binding domains is formed by linking an amino acid residue at position 135 according to EU numbering in the CH1 region of the first antigen-binding domain with an amino acid residue at any one of positions 132 to 138 according to EU numbering in the CH1 region of the second antigen-binding domain.
[0245] [41] The antigen-binding molecule of [39], wherein at least one of the bonds linking the two antigen-binding domains is formed by linking an amino acid residue at position 136 according to EU numbering in the CH1 region of the first antigen-binding domain with an amino acid residue at any one of positions 133 to 139 according to EU numbering in the CH1 region of the second antigen-binding domain.
[0246] [42] The antigen-binding molecule of [39], wherein at least one of the bonds linking the two antigen-binding domains is formed by linking an amino acid residue at position 191 according to EU numbering in the CH1 region of the first antigen-binding domain with an amino acid residue at any one of positions 188 to 194 according to EU numbering in the CH1 region of the second antigen-binding domain.
[0247] [43] The antigen-binding molecule of [40], wherein at least one of the bonds linking the two antigen-binding domains is formed by linking amino acid residues at position 135 according to EU numbering in the CH1 region of the two antigen-binding domains with each other.
[0248] [44] The antigen-binding molecule of [41], wherein at least one of the bonds linking the two antigen-binding domains is formed by linking amino acid residues at position 136 according to EU numbering in the CH1 region of the two antigen-binding domains with each other.
[0249] [45] The antigen-binding molecule of [42], wherein at least one of the bonds linking the two antigen-binding domains is formed by linking amino acid residues at position 191 according to EU numbering in the CH1 region of the two antigen-binding domains with each other.
[0250] [45A] The antigen-binding molecule of [42], wherein one disulfide bond is formed between the amino acid residues at position 191 according to EU numbering in the respective CH1 regions of the first antigen-binding domain and the second antigen-binding domain.
[0251] [45B] The antigen-binding molecule of [45A], wherein additional one, two or more disulfide bond(s) is/are formed between the first antigen-binding domain and the second antigen-binding domain via the amino acid residues at the following positions according to EU numbering in each of the respective CH1 regions of the first antigen-binding domain and the second antigen-binding domain:
   [0252] (a) between amino acid residues at any position of 131 to 138, 194 and 195 in each of the two antigen-binding domains;
   [0253] (b) between the amino acid residues at position 131 in each of the two antigen-binding domains, and between the amino acid residues at position 194 in each of the two antigen-binding domains;
   [0254] (c) between the amino acid residues at position 132 in each of the two antigen-binding domains, and between the amino acid residues at position 194 in each of the two antigen-binding domains;
   [0255] (d) between the amino acid residues at position 133 in each of the two antigen-binding domains, and between the amino acid residues at position 194 in each of the two antigen-binding domains;
   [0256] (e) between the amino acid residues at position 134 in each of the two antigen-binding domains, and between the amino acid residues at position 194 in each of the two antigen-binding domains;
   [0257] (f) between the amino acid residues at position 135 in each of the two antigen-binding domains, and between the amino acid residues at position 194 in each of the two antigen-binding domains;
   [0258] (g) between the amino acid residues at position 136 in each of the two antigen-binding domains, and between the amino acid residues at position 194 in each of the two antigen-binding domains;
   [0259] (h) between the amino acid residues at position 137 in each of the two antigen-binding domains, and between the amino acid residues at position 194 in each of the two antigen-binding domains;
   [0260] (i) between the amino acid residues at position 138 in each of the two antigen-binding domains, and between the amino acid residues at position 194 in each of the two antigen-binding domains;
   [0261] (j) between the amino acid residues at position 131 in each of the two antigen-binding domains, and between the amino acid residues at position 195 in each of the two antigen-binding domains;
   [0262] (k) between the amino acid residues at position 132 in each of the two antigen-binding domains, and between the amino acid residues at position 195 in each of the two antigen-binding domains;
   [0263] (l) between the amino acid residues at position 133 in each of the two antigen-binding domains, and between the amino acid residues at position 195 in each of the two antigen-binding domains;
   [0264] (m) between the amino acid residues at position 134 in each of the two antigen-binding domains, and between the amino acid residues at position 195 in each of the two antigen-binding domains;
   [0265] (n) between the amino acid residues at position 135 in each of the two antigen-binding domains, and between the amino acid residues at position 195 in each of the two antigen-binding domains;
   [0266] (o) between the amino acid residues at position 136 in each of the two antigen-binding domains, and between the amino acid residues at position 195 in each of the two antigen-binding domains;
   [0267] (p) between the amino acid residues at position 137 in each of the two antigen-binding domains, and between the amino acid residues at position 195 in each of the two antigen-binding domains; and
   [0268] (q) between the amino acid residues at position 138 in each of the two antigen-binding domains, and between the amino acid residues at position 195 in each of the two antigen-binding domains.
[0269] [45C] The antigen-binding molecule of [45A] or [45B], wherein any one of the first and second antigen-binding domains comprises one, two or more charged amino acid residues at position 136-138 (according to EU numbering) in the respective CH1 region; and the other antigen-binding domain out of the first and second antigen-binding domains comprises one, two or more oppositely charged amino acid residues at position 193-195 (according to EU numbering) in the respective CH1 region.
[0270] [45D] The antigen-binding molecule of [45A] or [45B], wherein any one of the first and second antigen-binding domains comprises one, two or more positively charged amino acid residues at position 136-138 (according to EU numbering) in the respective CH1 region; and the other antigen-binding domain out of the first and second antigen-binding domains comprises one, two or more negatively charged amino acid residues at position 193-195 (according to EU numbering) in the respective CH1 region.
[0271] [45E] The antigen-binding molecule of [45A] or [45B], wherein any one of the first and second antigen-binding domains comprises one, two or more negatively charged amino acid residues at position 136-138 (according to EU numbering) in the respective CH1 region; and the other antigen-binding domain out of the first and second antigen-binding domains comprises one, two or more positively charged amino acid residues at position 193-195 (according to EU numbering) in the respective CH1 region.
[0272] [45F] The antigen-binding molecule of [45A] or [45B], wherein any one of the first and second antigen-binding domains comprises one, two or more of the following amino acid residues in the respective CH1 region (according to EU numbering):
   [0273] (a) the amino acid residue at position 136 is glutamic acid (E) or aspartic acid (D);
   [0274] (b) the amino acid residue at position 137 is glutamic acid (E) or aspartic acid (D);
   [0275] (c) the amino acid residue at position 138 is glutamic acid (E) or aspartic acid (D); and the other antigen-binding domain out of the first and second antigen-binding domains comprises one, two or more of the following amino acid residues in the respective CH1 region (according to EU numbering):
   [0276] (d) the amino acid residue at position 193 is lysine (K), arginine (R), or histidine (H);
   [0277] (e) the amino acid residue at position 194 is lysine (K), arginine (R), or histidine (H); and
   [0278] (f) the amino acid residue at position 195 is lysine (K), arginine (R), or histidine (H).
[0279] [45G-1] The antigen-binding molecule of [45A] or [45B], wherein any one of the first and second antigen-binding domains comprises one or more of the following amino acid residues in the respective CH1 region (according to EU numbering):
   [0280] (a) the amino acid residue at position 136 is lysine (K), arginine (R), or histidine (H);
   [0281] (b) the amino acid residue at position 137 is lysine (K), arginine (R), or histidine (H);
   [0282] (c) the amino acid residue at position 138 is lysine (K), arginine (R), or histidine (H); and the other antigen-binding domain out of the first and second antigen-binding domains comprises one or more of the following amino acid residues in the respective CH1 region (according to EU numbering):
   [0283] (d) the amino acid residue at position 193 is glutamic acid (E) or aspartic acid (D);
   [0284] (e) the amino acid residue at position 194 is glutamic acid (E) or aspartic acid (D); and
   [0285] (f) the amino acid residue at position 195 is glutamic acid (E) or aspartic acid (D).
[0286] [45G-2] The antigen-binding molecule of [45A] or [45B], wherein each of the first and second antigen-binding domains comprises any of the specific charged mutation combination in the respective CH1 region (according to EU numbering) as listed in Tables 7, Table 82 or Table 85.
[0287] [45H] The antigen-binding molecule of [45A] or [45B], wherein any one of the first and second antigen-binding domains comprises one, two or more hydrophobic amino acid residues at position 136-138 (according to EU numbering) in the respective CH1 region; and the other antigen-binding domain out of the first and second antigen-binding domains comprises one, two or more hydrophobic amino acid residues at position 193-195 (according to EU numbering) in the respective CH1 region.
[0288] [45I-1] The antigen-binding molecule of [45H], wherein said hydrophobic amino acid residue(s) is/are alanine (Ala), valine (Val), leucine (Leu), isoleucine (Ile), phenylalanine (Phe), and/or tryptophan (Trp).
[0289] [45I-2] The method of [45A] or [45B], wherein each of the first and second antigen-binding domains comprises any of the specific hydrophobic amino acid mutation combination in the respective CH1 region (according to EU numbering) as listed in Table 10.
[0290] [45J] The antigen-binding molecule of [45A] or [45B], wherein any one of the first and second antigen-binding domains comprises one “knob” amino acid residues at position 136-138 (according to EU numbering) in the respective CH1 region; and the other antigen-binding domain out of the first and second antigen-binding domains comprises one, two or more “hole” amino acid residues at position 193-195 (according to EU numbering) in the respective CH1 region.
[0291] [45K] The antigen-binding molecule of [45A] or [45B], wherein any one of the first and second antigen-binding domains comprises one, two or more “hole” amino acid residues at position 136-138 (according to EU numbering) in the respective CH1 region; and the other antigen-binding domain out of the first and second antigen-binding domains comprises one “knob” amino acid residues at position 193-195 (according to EU numbering) in the respective CH1 region.
[0292] [45L] The antigen-binding molecule of [45J] or [45K], wherein said “knob” amino acid residue(s) is/are selected from the group consisting of tryptophan (Trp) and phenylalanine (Phe); and said “hole” amino acid residue(s) is/are selected from the group consisting of alanine (Ala), valine (Val), threonine (T) or serine (S).
[0293] [45M] The antigen-binding molecule of [45A] or [45B], wherein any one of the first and second antigen-binding domains comprises one, two or more aromatic amino acid residues at position 136-138 (according to EU numbering) in the respective CH1 region; and the other antigen-binding domain out of the first and second antigen-binding domains comprises one, two or more positively charged amino acid residues at position 193-195 (according to EU numbering) in the respective CH1 region.
[0294] [45N] The antigen-binding molecule of [45A] or [45B], wherein any one of the first and second antigen-binding domains comprises one, two or more positively charged amino acid residues at position 136-138 (according to EU numbering) in the respective CH1 region; and the other antigen-binding domain out of the first and second antigen-binding domains comprises one, two or more aromatic amino acid residues at position 193-195 (according to EU numbering) in the respective CH1 region.
[0295] [45O] The antigen-binding molecule of [45M] or [45N], wherein said aromatic amino acid residue(s) is/are selected from the group consisting of tryptophan (Trp), tyrosine (Tyr), histidine (His), and phenylalanine (Phe); and said positively charged amino acid residue(s) is/are selected from a group consisting of lysine (K), arginine (R), or histidine (H).
[0296] [46] The antigen-binding molecule of [22] or [23], wherein the amino acid residue from which the bonds between the antigen-binding domains originate is present within a CL region.
[0297] [47] The antigen-binding molecule of [46], wherein the subclass of the CL region is kappa or lambda.
[0298] [48] The antigen-binding molecule of [46] or [47], wherein the amino acid residue from which the bonds between the antigen-binding domains originate is present at any one of positions 108 to 112, 121 to 128, 151 to 156, 184 to 190, 195 to 196, 200 to 203, and 208 to 213, according to Kabat numbering, in the CL region.
[0299] [49] The antigen-binding molecule of [48], wherein the amino acid residue from which the bonds between the antigen-binding domains originate is present at a position selected from the group consisting of positions 108, 109, 112, 121, 123, 126, 128, 151, 152, 153, 156, 184, 186, 188, 189, 190, 195, 196, 200, 201, 202, 203, 208, 210, 211, 212, and 213 according to Kabat numbering in the CL region.
[0300] [50] The antigen-binding molecule of [49], wherein the amino acid residue from which the bonds between the antigen-binding domains originate is present at position 126 according to Kabat numbering in the CL region.
[0301] [51] The antigen-binding molecule of any one of [46] to [50], wherein at least one of the bonds linking the two antigen-binding domains is formed by linking an amino acid residue in the CL region of the first antigen-binding domain with an amino acid residue in the CL region of the second antigen-binding domain.
[0302] [52] The antigen-binding molecule of [51], wherein the amino acid residues in the first antigen-binding domain and the second antigen-binding domain are each independently selected from the group consisting of positions 108, 109, 110, 111, and 112 according to Kabat numbering.
[0303] [53] The antigen-binding molecule of [51], wherein the amino acid residues in the first antigen-binding domain and the second antigen-binding domain are each independently selected from the group consisting of positions 121, 122, 123, 124, 125, 126, 127, and 128 according to Kabat numbering.
[0304] [54] The antigen-binding molecule of [51], wherein the amino acid residues in the first antigen-binding domain and the second antigen-binding domain are each independently selected from the group consisting of positions 151, 152, 153, 154, 155, and 156 according to Kabat numbering.
[0305] [55] The antigen-binding molecule of [51], wherein the amino acid residues in the first antigen-binding domain and the second antigen-binding domain are each independently selected from the group consisting of positions 184, 185, 186, 187, 188, 189, and 190 according to Kabat numbering.
[0306] [56] The antigen-binding molecule of [51], wherein the amino acid residues in the first antigen-binding domain and the second antigen-binding domain are each independently selected from the group consisting of positions 195 and 196 according to Kabat numbering.
[0307] [57] The antigen-binding molecule of [51], wherein the amino acid residues in the first antigen-binding domain and the second antigen-binding domain are each independently selected from the group consisting of positions 200, 201, 202, and 203 according to Kabat numbering.
[0308] [58] The antigen-binding molecule of [51], wherein the amino acid residues in the first antigen-binding domain and the second antigen-binding domain are each independently selected from the group consisting of positions 208, 209, 210, 211, 212, and 213 according to Kabat numbering.
[0309] [59] The antigen-binding molecule of any one of [51] to [58], wherein the difference between the positions of the amino acid residues in the first antigen-binding domain and the second antigen-binding domain is three amino acids or less
[0310] [60] The antigen-binding molecule of [59], wherein at least one of the bonds linking the two antigen-binding domains is formed by linking amino acid residues at position 126 according to Kabat numbering in the CL region of the two antigen-binding domains with each other.
[0311] [61] The antigen-binding molecule of any one of [24] to [29] and [46] to [50], wherein at least one of the bonds linking the two antigen-binding domains is formed by linking an amino acid residue in the CH1 region of the first antigen-binding domain with an amino acid residue in the CL region of the second antigen-binding domain.
[0312] [62] The antigen-binding molecule of [61], wherein the amino acid residue in the CH1 region is selected from the group consisting of positions 188, 189, 190, 191, 192, 193, 194, 195, 196, and 197 according to EU numbering, and the amino acid residue in the CL region is selected from the group consisting of positions 121, 122, 123, 124, 125, 126, 127, and 128 according to Kabat numbering.
[0313] [63] The antigen-binding molecule of [62], wherein at least one of the bonds linking the two antigen-binding domains is formed by linking an amino acid residue at position 191 according to EU numbering in the CH1 region of the first antigen-binding domain with an amino acid residue at position 126 according to Kabat numbering in the CL region of the second antigen-binding domain.
[0314] [64] The antigen-binding molecule of [21], wherein the amino acid residue from which the bonds between the antigen-binding domains originate is present within a variable region.
[0315] [65] The antigen-binding molecule of [64], wherein the amino acid residue from which the bonds between the antigen-binding domains originate is present within a VH region.
[0316] [66] The antigen-binding molecule of [65], wherein the amino acid residue from which the bonds between the antigen-binding domains originate is present at a position selected from the group consisting of positions 6, 8, 16, 20, 25, 26, 28, 74, and 82b according to Kabat numbering in the VH region.
[0317] [67] The antigen-binding molecule of [64], wherein the amino acid residue from which the bonds between the antigen-binding domains originate is present within a VL region.
[0318] [68] The antigen-binding molecule of [67], wherein the amino acid residue from which the bonds between the antigen-binding domains originate is present at a position selected from the group consisting of positions 21, 27, 58, 77, 100, 105, and 107 according to Kabat numbering in the VL region (subclass kappa).
[0319] [69] The antigen-binding molecule of [67], wherein the amino acid residue from which the bonds between the antigen-binding domains originate is present at a position selected from the group consisting of positions 6, 19, 33, and 34 according to Kabat numbering in the VL region (subclass lambda).
[0320] [70] The antigen-binding molecule of [64], wherein the amino acid residue from which the bonds between the antigen-binding domains originate is present within a VHH region.
[0321] [71] The antigen-binding molecule of [70], wherein the amino acid residue from which the bonds between the antigen-binding domains originate is present at a position selected from the group consisting of positions 4, 6, 7, 8, 9, 10, 11, 12, 14, 15, 17, 20, 24, 27, 29, 38, 39, 40, 41, 43, 44, 45, 46, 47, 48, 49, 67, 69, 71, 78, 80, 82, 82c, 85, 88, 91, 93, 94, and 107 according to Kabat numbering in the VHH region.
[0322] [72] The antigen-binding molecule of any one of [1] to [18], wherein at least one of the first and second antigen-binding domains comprises a non-antibody protein binding to a particular antigen, or a fragment thereof.
[0323] [73] The antigen-binding molecule of [72], wherein the non-antibody protein is either of a pair of a ligand and a receptor which specifically bind to each other.
[0324] [74] The antigen-binding molecule of any one of [1] to [73], wherein the antigen-binding domains comprise a hinge region.
[0325] [75] The antigen-binding molecule of [74], wherein at least one of cysteine residues present within the wild-type hinge region is substituted with another amino acid residue.
[0326] [76] The antigen-binding molecule of [75], wherein the cysteine residue is present at positions 226 and/or 229 according to EU numbering in the hinge region.
[0327] [77] The antigen-binding molecule of [74] or [76], wherein at least one of amino acid residues from which the bonds between the antigen-binding domains originate is present within the hinge region.
[0328] [78] The antigen-binding molecule of [77], wherein the amino acid residue from which the bonds between the antigen-binding domains originate is present at a position selected from the group consisting of positions 216, 218, and 219 according to EU numbering in the hinge region.
[0329] [79] The antigen-binding molecule of any one of [1] to [78], wherein the first antigen-binding domain and the second antigen-binding domain are linked with each other via two or more bonds.
[0330] [80] The antigen-binding molecule of [79], wherein at least one of amino acid residues from which the bonds between the antigen-binding domains originate is an amino acid residue present in a wild-type sequence.
[0331] [81] The antigen-binding molecule of [80], wherein the amino acid residue from which the bonds between the antigen-binding domains originate is present within a hinge region.
[0332] [82] The antigen-binding molecule of [81], wherein the amino acid residue from which the bonds between the antigen-binding domains originate is a cysteine residue in the hinge region.
[0333] [83] The antigen-binding molecule of any one of [80] to [82], wherein at least one of the bonds linking the two antigen-binding domains is a disulfide bond formed by crosslinking of cysteine residues present within the hinge region with each other.
[0334] [84] The antigen-binding molecule of [83], wherein the cysteine residues are present at positions 226 and/or 229 according to EU numbering in the hinge region.
[0335] [85] The antigen-binding molecule of any one of [79] to [84], wherein at least one of amino acid residues from which the bonds between the antigen-binding domains originate is present within the antibody fragment, and at least one of the amino acid residues is present within the hinge region.
[0336] [86] The antigen-binding molecule of [85], wherein the first and second antigen-binding domains each comprise a Fab and a hinge region, and wherein the antigen-binding molecule comprising the two antigen-binding domains is F(ab′)2. [87] The antigen-binding molecule of any one of [1] to [86], wherein the antigen-binding domains comprise an Fc region.
[0337] [88] The antigen-binding molecule of [87], wherein one or more amino acid mutations promoting multimerization of Fc regions are introduced into the Fc region.
[0338] [89] The antigen-binding molecule of [88], wherein the amino acid mutations promoting the multimerization comprise an amino acid mutation at at least one position selected from the group consisting of positions 247, 248, 253, 254, 310, 311, 338, 345, 356, 359, 382, 385, 386, 430, 433, 434, 436, 437, 438, 439, 440, and 447 according to EU numbering.
[0339] [90] The antigen-binding molecule of [88] or [89], wherein the multimerization is hexamerization.
[0340] [91] The antigen-binding molecule of any one of [87] to [90], which is a full-length antibody.

[0341] In another aspect, the present invention also provides the following:
[0342] [92] The antigen-binding molecule of any one of [1] to [91], wherein both the first and second antigen-binding domains bind to the same antigen.
[0343] [93] The antigen-binding molecule of [92], wherein both the first and second antigen-binding domains bind to the same epitope on said antigen.
[0344] [94] The antigen-binding molecule of [92], wherein each of the first and second antigen-binding domains binds to a different epitope on said antigen.
[0345] [95] The antigen-binding molecule of any one of [1] to [91], wherein each of the first and second antigen-binding domains binds to a different antigen.
[0346] [96] The antigen-binding molecule of [93], wherein both the first and second antigen-binding domains have the same amino acid sequence.
[0347] [97] The antigen-binding molecule of any one of [93] to [95], wherein each of the first and second antigen-binding domains has a different amino acid sequence.
[0348] [98] The antigen-binding molecule of any one of [1] to [91], wherein at least one of two antigens to which the first and second antigen-binding domains bind is a soluble protein.
[0349] [99] The antigen-binding molecule of any one of [1] to [91], wherein at least one of two antigens to which the first and second antigen-binding domains bind is a membrane protein.

[0350] In another aspect, the present invention also provides the following:
[0351] [100] The antigen-binding molecule of any one of [1] to [99], which has activity of regulating interaction between two antigen molecules.
[0352] [101] The antigen-binding molecule of [100], which is capable of enhancing or diminishing interaction between two antigen molecules as compared to a control antigen-binding molecule, wherein the control antigen-binding molecule differs from the antigen-binding molecule of [100] only in that the control antigen-binding molecule has one less bond between the two antigen-binding domains.
[0353] [102] The antigen-binding molecule of [100] or [101], wherein the two antigen molecules are a ligand and a receptor thereof, respectively, and wherein the antigen-binding molecule has activity of promoting activation of the receptor by the ligand.
[0354] [103] The antigen-binding molecule of [100] or [101], wherein the two antigen molecules are an enzyme and a substrate thereof, respectively, and wherein the antigen-binding molecule has activity of promoting catalytic reaction of the enzyme with the substrate.
[0355] [104] The antigen-binding molecule of [100] or [101], wherein both of the two antigen molecules are proteins present on cellular surfaces, and wherein the antigen-binding molecule has activity of promoting interaction between a cell expressing the first antigen and a cell expressing the second antigen.
[0356] [105] The antigen-binding molecule of [104], wherein the cell expressing the first antigen is a cell with cytotoxic activity, and the cell expressing the second antigen is a target cell thereof, and wherein the antigen-binding molecule promotes damage of said target cell by said cell with cytotoxic activity.
[0357] [106] The antigen-binding molecule of [105], wherein the cell with cytotoxic activity is a T cell, NK cell, monocyte, or macrophage.
[0358] [107] The antigen-binding molecule of any one of [1] to [99], which has activity of regulating activation of two antigen molecules which are activated by association with each other.
[0359] [108] The antigen-binding molecule of [107], which enhances or diminishes activation of two antigen molecules as compared to a control antigen-binding molecule, wherein the control antigen-binding molecule differs from the antigen-binding molecule of [107] only in that the control antigen-binding molecule has one less bond between the two antigen-binding domains.
[0360] [109] The antigen-binding molecule of [107] or [108], wherein the antigen molecules are selected from the group consisting of receptors belonging to cytokine receptor superfamilies, G protein-coupled receptors, ion channel receptors, tyrosine kinase receptors, immune checkpoint receptors, antigen receptors, CD antigens, costimulatory molecules, and cell adhesion molecules.
[0361] [110] The antigen-binding molecule of any one of [1] to [99], which has activity of holding two antigen molecules at spatially close positions.
[0362] [111] The antigen-binding molecule of [110], which is capable of holding two antigen molecules at closer positions than a control antigen-binding molecule, wherein the control antigen-binding molecule differs from the antigen-binding molecule of [110] only in that the control antigen-binding molecule has one less bond between the two antigen-binding domains.
[0363] [112] The antigen-binding molecule of any one of [1] to [99], wherein the two antigen-binding domains are at spatially close positions and/or the mobility of the two antigen-binding domains is reduced.
[0364] [113] The antigen-binding molecule of [112], wherein the two antigen-binding domains are at closer positions and/or the two antigen-binding domains have less mobility than a control antigen-binding molecule, wherein the control antigen-binding molecule differs from the antigen-binding molecule of [112] only in that the control antigen-binding molecule has one less bond between the two antigen-binding domains.
[0365] [114] The antigen-binding molecule of any one of [1] to [99], which has resistance to protease cleavage.
[0366] [115] The antigen-binding molecule of [114], which has increased resistance to protease cleavage as compared to a control antigen-binding molecule, wherein the control antigen-binding molecule differs from the antigen-binding molecule of [114] only in that the control antigen-binding molecule has one less bond between the two antigen-binding domains.
[0367] [116] The antigen-binding molecule of [115], wherein the proportion of the full-length molecule remaining after protease treatment is increased as compared to the control antigen-binding molecule.
[0368] [117] The antigen-binding molecule of [115] or [116], wherein the proportion of a particular fragment produced after protease treatment is reduced as compared to the control antigen-binding molecule.
[0369] [118] The antigen-binding molecule of any one of [1] to [99], wherein when the molecule is treated with a protease, a dimer of the antigen-binding domains or fragments thereof is excised.
[0370] [119] The antigen-binding molecule of [118], wherein when the control antigen-binding molecule is treated with said protease, monomers of the antigen-binding domains or fragments thereof are excised, and wherein the control antigen-binding molecule differs from the antigen-binding molecule of [118] only in that the control antigen-binding molecule has one less bond between the two antigen-binding domains.
[0371] [120] The antigen-binding molecule of [118] or [119], wherein the protease cleaves the hinge region.
[0372] [121] The antigen binding molecule of any one of [101] to [106], [108] to [109], [111], [113], [115] to [117], and [119] to [120], wherein the one less bond is a bond formed originating from a mutated amino acid residue.
[0373] [122] The antigen-binding molecule of [121], wherein the mutated amino acid residue is a cysteine residue.

[0374] In another aspect, the present invention also provides the following:
[0375] [123] A pharmaceutical composition comprising the antigen-binding molecule of any one of [1] to [122] and a pharmaceutically acceptable carrier.

[0376] In another aspect, the present invention also provides the following:
[0377] [124] A method for regulating interaction between two antigen molecules, comprising:
   [0378] (a) providing an antigen-binding molecule comprising two antigen-binding domains,
   [0379] (b) adding to the antigen-binding molecule at least one bond which links the two antigen-binding domains with each other, and
   [0380] (c) contacting the antigen-binding molecule produced in (b) with the two antigen molecules.
[0381] [125] A method for regulating activity of two antigen molecules which are activated by association with each other, comprising:
   [0382] (a) providing an antigen-binding molecule comprising two antigen-binding domains,
   [0383] (b) adding to the antigen-binding molecule at least one bond which links the two antigen-binding domains with each other, and
   [0384] (c) contacting the antigen-binding molecule produced in (b) with the two antigen molecules.
[0385] [126] A method for holding two antigen molecules at spatially close positions, comprising:
   [0386] (a) providing an antigen-binding molecule comprising two antigen-binding domains,
   [0387] (b) adding to the antigen-binding molecule at least one bond which links the two antigen-binding domains with each other, and
   [0388] (c) contacting the antigen-binding molecule produced in (b) with the two antigen molecules.
[0389] [127] A method for placing two antigen-binding domains at spatially close positions and/or reducing the mobility of the two antigen-binding domains, comprising:
   [0390] (a) providing an antigen-binding molecule comprising two antigen-binding domains, and
   [0391] (b) adding to the antigen-binding molecule at least one bond which links the two antigen-binding domains with each other.
[0392] [128] A method for increasing resistance of an antigen-binding molecule to protease cleavage, comprising:
   [0393] (a) providing an antigen-binding molecule comprising two antigen-binding domains, and
   [0394] (b) adding to the antigen-binding molecule at least one bond which links the two antigen-binding domains with each other.

[0395] In another aspect, the present invention also provides the following:
[0396] [129] A method for producing an antigen-binding molecule which has activity of regulating interaction between two antigen molecules, comprising:
   [0397] (a) providing a nucleic acid encoding a polypeptide comprising a first antigen-binding domain and a nucleic acid encoding a polypeptide comprising a second antigen-binding domain,
   [0398] (b) introducing a mutation into the nucleic acids encoding the two antigen-binding domains such that at least one bond linking the two antigen-binding domains is added,
   [0399] (c) introducing the nucleic acids produced in (b) into a host cell,
   [0400] (d) culturing the host cell such that the two polypeptides are expressed, and
   [0401] (e) obtaining an antigen-binding molecule which is a polypeptide comprising the first and second antigen-binding domains, wherein the two antigen-binding domains are linked with each other via one or more bonds.
[0402] [130] A method for producing an antigen-binding molecule which has activity of regulating activation of two antigen molecules which are activated by association with each other, comprising:
   [0403] (a) providing a nucleic acid encoding a polypeptide comprising a first antigen-binding domain and a nucleic acid encoding a polypeptide comprising a second antigen-binding domain,
   [0404] (b) introducing a mutation into the nucleic acids encoding the two antigen-binding domains such that at least one bond linking the two antigen-binding domains is added,
   [0405] (c) introducing the nucleic acids produced in (b) into a host cell,
   [0406] (d) culturing the host cell such that the two polypeptides are expressed, and
   [0407] (e) obtaining an antigen-binding molecule which is a polypeptide comprising the first and second antigen-binding domains, wherein the two antigen-binding domains are linked with each other via one or more bonds.
[0408] [131] A method for producing an antigen-binding molecule which has activity of holding two antigen molecules at spatially close positions, comprising:
   [0409] (a) providing a nucleic acid encoding a polypeptide comprising a first antigen-binding domain and a nucleic acid encoding a polypeptide comprising a second antigen-binding domain,
   [0410] (b) introducing a mutation into the nucleic acids encoding the two antigen-binding domains such that at least one bond linking the two antigen-binding domains is added,
   [0411] (c) introducing the nucleic acids produced in (b) into a host cell,
   [0412] (d) culturing the host cell such that the two polypeptides are expressed, and
   [0413] (e) obtaining an antigen-binding molecule which is a polypeptide comprising the first and second antigen-binding domains, wherein the two antigen-binding domains are linked with each other via one or more bonds.
[0414] [132] A method for producing an antigen-binding molecule in which two antigen-binding domains are present at spatially close positions and/or the mobility of the two antigen binding domains is reduced, comprising:
   [0415] (a) providing a nucleic acid encoding a polypeptide comprising a first antigen-binding domain and a nucleic acid encoding a polypeptide comprising a second antigen-binding domain,
   [0416] (b) introducing a mutation into the nucleic acids encoding the two antigen-binding domains such that at least one bond linking the two antigen-binding domains is added,
   [0417] (c) introducing the nucleic acids produced in (b) into a host cell,
   [0418] (d) culturing the host cell such that the two polypeptides are expressed, and
   [0419] (e) obtaining an antigen-binding molecule which is a polypeptide comprising the first and second antigen-binding domains, wherein the two antigen-binding domains are linked with each other via one or more bonds.
[0420] [133] A method for producing an antigen-binding molecule which has increased resistance to protease cleavage, comprising:
   [0421] (a) providing a nucleic acid encoding a polypeptide comprising a first antigen-binding domain and a nucleic acid encoding a polypeptide comprising a second antigen-binding domain,
   [0422] (b) introducing a mutation into the nucleic acids encoding the two antigen-binding domains such that at least one bond linking the two antigen-binding domains is added,
   [0423] (c) introducing the nucleic acids produced in (b) into a host cell,
   [0424] (d) culturing the host cell such that the two polypeptides are expressed, and
   [0425] (e) obtaining an antigen-binding molecule which is a polypeptide comprising the first and second antigen-binding domains, wherein the two antigen-binding domains are linked with each other via one or more bonds.

[0426] In another aspect, the present invention also provides the following:
[0427] [134] A method for identifying a novel pair of protein molecules which are activated by association with each other, comprising:
   [0428] (a) providing two arbitrary protein molecules,
   [0429] (b) producing, by the method of any one of [129] to [133], an antigen-binding molecule comprising two antigen-binding domains which respectively bind to the two protein molecules,
   [0430] (c) contacting the antigen-binding molecule produced in (b) with the two protein molecules, and
   [0431] (d) assessing whether or not the two protein molecules are activated.
[0432] [135] The method of [134], wherein at least one of the protein molecules is selected from the group consisting of receptors belonging to cytokine receptor superfamilies, G protein-coupled receptors, ion channel receptors, tyrosine kinase receptors, immune checkpoint receptors, antigen receptors, CD antigens, costimulatory molecules, and cell adhesion molecules.

### BRIEF DESCRIPTION OF DRAWINGS

[0433] FIG. 1 shows a non-reducing SDS-PAGE gel image for analyzing OKT3 and its variants with the cysteine substitution (see Example 1). Two broken lines indicate upper and lower bands. The lower band can be considered to correspond to the antibody having one or more engineered disulfide bond(s) formed between the CH1 regions.

[0434] FIG. 2 shows a non-reducing SDS-PAGE gel image for analyzing OKT3 variants with the cysteine substitution and OKT3-KiH (see Example 1). Two broken lines indicate upper and lower bands.

[0435] FIG. 3 shows a non-reducing SDS-PAGE gel image for analyzing OKT3-KiH variants with the cysteine substitution (see Example 1). Two broken lines indicate upper and lower bands.

[0436] FIG. 4 shows a non-reducing SDS-PAGE gel image for analyzing OKT3-KiH variants with the cysteine substitution (see Example 1). Two broken lines indicate upper and lower bands.

[0437] FIG. 5 shows an image of non-reducing SDS-PAGE gel in which 2-MEA concentrations of each sample are described (left panel); and a graph showing the lower band to upper band ratio (crosslinking ratio or crosslinking %) of each sample (right panel) (see Example 4). 20 mg/mL of the antibody was reacted by mixing with 2-MEA of different concentrations. The leftmost bar and dotted line represent the lower band to upper band ratio (crosslinking ratio or crosslinking %) of the control (0 mM 2-MEA). Numbers in the bars are the values of the lower band to upper band ratios (crosslinking ratio or crosslinking %).

[0438] FIG. 6 shows an image of non-reducing SDS-PAGE gel in which 2-MEA concentrations of each sample are described (upper panel); and a graph showing the lower band to upper band ratio (crosslinking ratio or crosslinking %) of each sample (lower panel) (see Example 4). 20 mg/mL of the antibody was reacted by mixing with 2-MEA of different concentrations. The leftmost bar and dotted line represent the lower band to upper band ratio (crosslinking ratio or crosslinking %) of the control (0 mM 2-MEA). Numbers in the bars are the values of the lower band to upper band ratio (crosslinking ratio or crosslinking %).

[0439] FIG. 7 shows an image of non-reducing SDS-PAGE gel in which 2-MEA concentrations of each sample are described (left panel); and a graph showing the lower band to upper band ratio (crosslinking ratio or crosslinking %) of each sample (right panel) (see Example 4). 1 mg/mL of the antibody was reacted by mixing with 2-MEA of different concentrations. The leftmost bar and dotted line represent the lower band to upper band ratio (crosslinking ratio or crosslinking %) of the control (0 mM 2-MEA). Numbers in the bars are the value of the lower band to upper band ratio (crosslinking ratio or crosslinking %).

[0440] FIG. 8 shows an image of non-reducing SDS-PAGE gel in which 2-MEA concentrations of each sample are described (upper panel); and a graph showing the lower band to upper band ratio (crosslinking ratio or crosslinking %) of each sample (lower panel) (see Example 4). 1 mg/mL of the antibody was reacted by mixing with 2-MEA of different concentrations. The leftmost bar and dotted line represent the lower band to upper band ratio (crosslinking ratio or crosslinking %) of the control (0 mM 2-MEA). Numbers in the bars are the values of the lower band to upper band ratio (crosslinking ratio or crosslinking %).

[0441] FIG. 9 shows an image of non-reducing SDS-PAGE gel in which TCEP concentrations of each sample are described (left panel); and a graph showing the lower band to upper band ratio (crosslinking ratio or crosslinking %) of each sample (right panel) (see Example 5). 20 mg/mL of the antibody was reacted by mixing with TCEP of different concentrations. The leftmost bar and dotted line represent the lower band to upper band ratio (crosslinking ratio or crosslinking %) of the control (0 mM TCEP). Numbers in the bars are the values of the lower band to upper band ratio (crosslinking ratio or crosslinking %).

[0442] FIG. 10 shows an image of non-reducing SDS-PAGE gel in which TCEP concentrations of each sample are described (upper panel); and a graph showing the lower band to upper band ratio (crosslinking ratio or crosslinking %) of each sample (lower panel) (see Example 5). 20 mg/mL of the antibody was reacted by mixing with TCEP of each concentration. N.D. means that no band was detected. The leftmost bar and dotted line represent the lower band to upper band ratio (crosslinking ratio or crosslinking %) of the control (0 mM TCEP). Numbers in the bars are the values of the lower band to upper band ratio (crosslinking ratio or crosslinking %).

[0443] FIG. 11 shows an image of non-reducing SDS-PAGE gel in which TCEP concentrations of each sample are described (upper panel); and a graph showing the lower band to upper band ratio (crosslinking ratio or crosslinking %) of each sample (lower panel) (see Example 5). 1 mg/mL of the antibody was reacted by mixing with TCEP of each concentration. N.D. means that no band was detected. The leftmost bar and dotted line represent the lower band to upper band ratio (crosslinking ratio or crosslinking %) of the control (0 mM TCEP). Numbers in the bars are the values of the lower band to upper band ratio (crosslinking ratio or crosslinking %).

[0444] FIG. 12 shows an image of non-reducing SDS-PAGE gel in which reagent concentrations of each sample are described (upper panel); and a graph showing the lower band to upper band ratio (crosslinking ratio or crosslinking %) of samples reacted with DTT (left) or Cysteine (right) (see Example 6). 20 mg/mL of the antibody was reacted by mixing with DTT or Cysteine of each concentration. The leftmost bar and dotted line represent the lower band to upper band ratio (crosslinking ratio or crosslinking %) of the control (without reducing agent). Numbers in the bars are the values of the lower band to upper band ratio (crosslinking ratio or crosslinking %).

[0445] FIG. 13 shows an image of non-reducing SDS-PAGE gel in which reagent concentrations of each sample are described (upper panel); and a graph showing the lower band to upper band ratio (crosslinking ratio or crosslinking %) of samples reacted with GSH (left) or Na₂SO₃ (right) (lower panel) (see Example 6). 20 mg/mL of the antibody was reacted by mixing with GSH or Na₂SO₃ of each concentration. The leftmost bar and dotted line represent the lower band to upper band ratio (crosslinking ratio or crosslinking %) of the control (without reducing agent). Numbers in the bars are the values of the lower band to upper band ratio (crosslinking ratio or crosslinking %).

[0446] FIG. 14 shows an image of non-reducing SDS-PAGE gel (see Example 7). 20 mg/mL of the antibody was reacted by mixing with 2-MEA or TCEP in pH 3, 4, and 5 conditions. Buffer pH of each sample is described in the figure. Lanes 3, 6 and 9: without reducing agent. Lanes 4, 7 and 10: mixed with 1 mM 2-MEA. Lanes 5, 8, and 11: mixed with 0.25 mM TCEP.

[0447] FIG. 15 shows an image of non-reducing SDS-PAGE gel (see Example 7). 20 mg/mL of the antibody was reacted by mixing with 2-MEA or TCEP in pH 6, 7 and 8 conditions. Buffer pH of each sample is described in the figure. Lanes 3, 6 and 9: without reducing agent. Lanes 4, 7 and 10: mixed with 1 mM 2-MEA. Lanes 5, 8, and 11: mixed with 0.25 mM TCEP.

[0448] FIG. 16 shows a graph showing the lower band to upper band ratio (crosslinking ratio) of the antibody samples in FIGS. 14 and 15 (see Example 7). For each pH, the leftmost (white) bar represents the lower band to upper band ratio (crosslinking ratio) of the control (without reducing agent treatment). The middle (shaded) bars represent the lower band to upper band ratio (crosslinking ratio) of samples mixed with 1 mM 2-MEA. The rightmost (black) bars represent the lower band to upper band ratio (crosslinking ratio) of samples mixed with 0.25 mM TCEP. Numbers in the bars are the values of the lower band to upper band ratio (crosslinking ratio).

[0449] FIG. 17 shows a chromatogram of cation exchange chromatography performed on the OKT3.S191C antibody sample as described in Example 8-1.

[0450] FIG. 18 shows a gel image of the non-reducing SDS-PAGE analysis of the OKT3.S191C antibody sample separated by cation exchange chromatography as described in Example 8-1. Lanes 5 and 10: OKT3.S191C (non-fractionated). Lane 6: mixture of RA3 and RA4. Lane 7: mixture of RA5 and RA6. Lane 8: mixture of RA7 and RA8. Lane 9: mixture of RA9 and RA10.

[0451] FIG. 19 shows a chromatogram of cation exchange chromatography performed on the OKT3.S191C0110 antibody sample as described in Example 8-2.

[0452] FIG. 20 shows a gel image of the non-reducing SDS-PAGE analysis of the OKT3.S191C0110 antibody sample separated by cation exchange chromatography as described in Example 8-2. Lane 3: OKT3.S191C0110 (non-fractionated). Lane 4: mixture of RA4 and RA5. Lane 5: mixture of RA6 and RA7. Lane 6: mixture of RA8 and RA9. Lane 7: mixture of RA10 and RA11. Lane 8: mixture of RB11 and RB10. Lane 9: mixture of RB8 and RB7. Lane 10: mixture of RB6 and RB5. Lane 11: mixture of RB4 and RB3.

[0453] FIG. 21 depicts examples of modified antibodies in which the Fabs are crosslinked with each other as described in Reference Example 1. The figure schematically shows structural differences between a wild-type antibody (WT) and a modified antibody in which the CH1 regions of antibody H chain are crosslinked with each other (HH type), a modified antibody in which the CL regions of antibody L chain are crosslinked with each other (LL type), and a modified antibody in which the CH1 region of antibody H chain is crosslinked with the CL region of antibody L chain (HL or LH type).

[0454] FIG. 22 shows the results of assaying the CD3-mediated agonist activity of a wild-type anti-CD3 epsilon antibody molecule (CD3-G4s) and modified antibody molecules produced by linking the Fab-Fab of the wild-type molecule via an additional disulfide bond (CD3-G4sLL, CD3-G4sHH), as described in Reference Example 4-3.

[0455] FIG. 23 shows the results of assaying the CD3-mediated agonist activity of a wild-type anti-CD3 epsilon antibody molecule (OKT3-G1s) and modified antibody molecules produced by linking the Fab-Fab of the wild-type molecule via an additional disulfide bond (OKT3-G1sLL, OKT3-G1sHH), as described in Reference Example 4-3.

[0456] FIG. 24 shows the results of assaying the CD3- and/or CD28-mediated agonist activity of a wild-type anti-CD3 epsilon antibody molecule (CD3-G1s), an anti-CD28 antibody molecule (CD28-G1s), and an anti-CD3 epsilon×anti-CD28 bispecific antibody (CD3//CD28-G1s), and modified antibody molecules produced by linking the Fab-Fab of the bispecific antibody via an additional disulfide bond (CD3//CD28-G1sLL, CD3//CD28-G1sHH, CD3//CD28-G1sLH, CD3//CD28-G1sHL), as described in Reference Example 4-3.

[0457] FIG. 25 shows the results of assaying the CD3- and/or CD28-mediated agonist activity of a wild-type anti-CD3 epsilon antibody molecule (OKT3-G1s), an anti-CD28 antibody molecule (CD28-G1s), and an anti-CD3 epsilon×anti-CD28 bispecific antibody (OKT3//CD28-G1s), and modified antibody molecules produced by linking the Fab-Fab of the bispecific antibody via an additional disulfide bond (OKT3//CD28-G1sHH, OKT3//CD28-G1sHL), as described in Reference Example 4-3.

[0458] FIG. 26 shows the results of protease treatment of an anti-IL6R antibody (MRA), modified antibodies produced by introducing a cysteine substitution into the heavy chain variable region of the anti-IL6R antibody (MRAH.xxx-G1T4), and modified antibodies produced by introducing a cysteine substitution into the heavy chain constant region of the anti-IL6R antibody (MRAH-G1T4.xxx), as described in Reference Example 5-2 (1/8). Each protease-treated antibody was applied to non-reducing capillary electrophoresis, followed by band detection with an anti-kappa chain antibody.

[0459] FIG. 27 shows the results of protease treatment of an anti-IL6R antibody (MRA), modified antibodies produced by introducing a cysteine substitution into the heavy chain variable region of the anti-IL6R antibody (MRAH.xxx-G1T4), and modified antibodies produced by introducing a cysteine substitution into the heavy chain constant region of the anti-IL6R antibody (MRAH-G1T4.xxx), as described in Reference Example 5-2 (2/8). Each protease-treated antibody was applied to non-reducing capillary electrophoresis, followed by band detection with an anti-kappa chain antibody.

[0460] FIG. 28 shows the results of protease treatment of an anti-IL6R antibody (MRA), modified antibodies produced by introducing a cysteine substitution into the heavy chain variable region of the anti-IL6R antibody (MRAH.xxx-G1T4), and modified antibodies produced by introducing a cysteine substitution into the heavy chain constant region of the anti-IL6R antibody (MRAH-G1T4.xxx), as described in Reference Example 5-2 (3/8). Each protease-treated antibody was applied to non-reducing capillary electrophoresis, followed by band detection with an anti-kappa chain antibody.

[0461] FIG. 29 shows the results of protease treatment of an anti-IL6R antibody (MRA), modified antibodies produced by introducing a cysteine substitution into the heavy chain variable region of the anti-IL6R antibody (MRAH.xxx-G1T4), and modified antibodies produced by introducing a cysteine substitution into the heavy chain constant region of the anti-IL6R antibody (MRAH-G1T4.xxx), as described in Reference Example 5-2 (4/8). Each protease-treated antibody was applied to non-reducing capillary electrophoresis, followed by band detection with an anti-kappa chain antibody.

[0462] FIG. 30 shows the results of protease treatment of an anti-IL6R antibody (MRA), modified antibodies produced by introducing a cysteine substitution into the heavy chain variable region of the anti-IL6R antibody (MRAH.xxx-G1T4), and modified antibodies produced by introducing a cysteine substitution into the heavy chain constant region of the anti-IL6R antibody (MRAH-G1T4.xxx), as described in Reference Example 5-2 (5/8). Each protease-treated antibody was applied to non-reducing capillary electrophoresis, followed by band detection with an anti-kappa chain antibody.

[0463] FIG. 31 shows the results of protease treatment of an anti-IL6R antibody (MRA), modified antibodies produced by introducing a cysteine substitution into the heavy chain variable region of the anti-IL6R antibody (MRAH.xxx-G1T4), and modified antibodies produced by introducing a cysteine substitution into the heavy chain constant region of the anti-IL6R antibody (MRAH-G1T4.xxx), as described in Reference Example 5-2 (6/8). Each protease-treated antibody was applied to non-reducing capillary electrophoresis, followed by band detection with an anti-kappa chain antibody.

[0464] FIG. 32 shows the results of protease treatment of an anti-IL6R antibody (MRA), modified antibodies produced by introducing a cysteine substitution into the heavy chain variable region of the anti-IL6R antibody (MRAH.xxx-G1T4), and modified antibodies produced by introducing a cysteine substitution into the heavy chain constant region of the anti-IL6R antibody (MRAH-G1T4.xxx), as described in Reference Example 5-2 (7/8). Each protease-treated antibody was applied to non-reducing capillary electrophoresis, followed by band detection with an anti-kappa chain antibody.

[0465] FIG. 33 shows the results of protease treatment of an anti-IL6R antibody (MRA), modified antibodies produced by introducing a cysteine substitution into the heavy chain variable region of the anti-IL6R antibody (MRAH.xxx-G1T4), and modified antibodies produced by introducing a cysteine substitution into the heavy chain constant region of the anti-IL6R antibody (MRAH-G1T4.xxx), as described in Reference Example 5-2 (8/8). Each protease-treated antibody was applied to non-reducing capillary electrophoresis, followed by band detection with an anti-kappa chain antibody.

[0466] FIG. 34 shows the results of protease treatment of an anti-IL6R antibody (MRA), modified antibodies produced by introducing a cysteine substitution into the light chain variable region of the anti-IL6R antibody (MRAL.xxx-k0), and modified antibodies produced by introducing a cysteine substitution into the light chain constant region of the anti-IL6R antibody (MRAL-k0.xxx), as described in Reference Example 6-2 (1/10). Each protease-treated antibody was applied to non-reducing capillary electrophoresis, followed by band detection with an anti-kappa chain antibody.

[0467] FIG. 35 shows the results of protease treatment of an anti-IL6R antibody (MRA), modified antibodies produced by introducing a cysteine substitution into the light chain variable region of the anti-IL6R antibody (MRAL.xxx-k0), and modified antibodies produced by introducing a cysteine substitution into the light chain constant region of the anti-IL6R antibody (MRAL-k0.xxx), as described in Reference Example 6-2 (2/10). Each protease-treated antibody was applied to non-reducing capillary electrophoresis, followed by band detection with an anti-kappa chain antibody.

[0468] FIG. 36 shows the results of protease treatment of an anti-IL6R antibody (MRA), modified antibodies produced by introducing a cysteine substitution into the light chain variable region of the anti-IL6R antibody (MRAL.xxx-k0), and modified antibodies produced by introducing a cysteine substitution into the light chain constant region of the anti-IL6R antibody (MRAL-k0.xxx), as described in Reference Example 6-2 (3/10). Each protease-treated antibody was applied to non-reducing capillary electrophoresis, followed by band detection with an anti-kappa chain antibody.

[0469] FIG. 37 shows the results of protease treatment of an anti-IL6R antibody (MRA), modified antibodies produced by introducing a cysteine substitution into the light chain variable region of the anti-IL6R antibody (MRAL.xxx-k0), and modified antibodies produced by introducing a cysteine substitution into the light chain constant region of the anti-IL6R antibody (MRAL-k0.xxx), as described in Reference Example 6-2 (4/10). Each protease-treated antibody was applied to non-reducing capillary electrophoresis, followed by band detection with an anti-kappa chain antibody.

[0470] FIG. 38 shows the results of protease treatment of an anti-IL6R antibody (MRA), modified antibodies produced by introducing a cysteine substitution into the light chain variable region of the anti-IL6R antibody (MRAL.xxx-k0), and modified antibodies produced by introducing a cysteine substitution into the light chain constant region of the anti-IL6R antibody (MRAL-k0.xxx), as described in Reference Example 6-2 (5/10). Each protease-treated antibody was applied to non-reducing capillary electrophoresis, followed by band detection with an anti-kappa chain antibody.

[0471] FIG. 39 shows the results of protease treatment of an anti-IL6R antibody (MRA), modified antibodies produced by introducing a cysteine substitution into the light chain variable region of the anti-IL6R antibody (MRAL.xxx-k0), and modified antibodies produced by introducing a cysteine substitution into the light chain constant region of the anti-IL6R antibody (MRAL-k0.xxx), as described in Reference Example 6-2 (6/10). Each protease-treated antibody was applied to non-reducing capillary electrophoresis, followed by band detection with an anti-kappa chain antibody.

[0472] FIG. 40 shows the results of protease treatment of an anti-IL6R antibody (MRA), modified antibodies produced by introducing a cysteine substitution into the light chain variable region of the anti-IL6R antibody (MRAL.xxx-k0), and modified antibodies produced by introducing a cysteine substitution into the light chain constant region of the anti-IL6R antibody (MRAL-k0.xxx), as described in Reference Example 6-2 (7/10). Each protease-treated antibody was applied to non-reducing capillary electrophoresis, followed by band detection with an anti-kappa chain antibody.

[0473] FIG. 41 shows the results of protease treatment of an anti-IL6R antibody (MRA), modified antibodies produced by introducing a cysteine substitution into the light chain variable region of the anti-IL6R antibody (MRAL.xxx-k0), and modified antibodies produced by introducing a cysteine substitution into the light chain constant region of the anti-IL6R antibody (MRAL-k0.xxx), as described in Reference Example 6-2 (8/10). Each protease-treated antibody was applied to non-reducing capillary electrophoresis, followed by band detection with an anti-kappa chain antibody.

[0474] FIG. 42 shows the results of protease treatment of an anti-IL6R antibody (MRA), modified antibodies produced by introducing a cysteine substitution into the light chain variable region of the anti-IL6R antibody (MRAL.xxx-k0), and modified antibodies produced by introducing a cysteine substitution into the light chain constant region of the anti-IL6R antibody (MRAL-k0.xxx), as described in Reference Example 6-2 (9/10). Each protease-treated antibody was applied to non-reducing capillary electrophoresis, followed by band detection with an anti-kappa chain antibody.

[0475] FIG. 43 shows the results of protease treatment of an anti-IL6R antibody (MRA), modified antibodies produced by introducing a cysteine substitution into the light chain variable region of the anti-IL6R antibody (MRAL.xxx-k0), and modified antibodies produced by introducing a cysteine substitution into the light chain constant region of the anti-IL6R antibody (MRAL-k0.xxx), as described in Reference Example 6-2 (10/10). Each protease-treated antibody was applied to non-reducing capillary electrophoresis, followed by band detection with an anti-kappa chain antibody.

[0476] FIG. 44 shows the results of protease treatment of an anti-IL6R antibody (MRA) and a modified antibody produced by introducing a cysteine substitution into the light chain constant region of the anti-IL6R antibody (MRAL-k0.K126C), as described in Reference Example 7-2. Each protease-treated antibody was applied to non-reducing capillary electrophoresis, followed by band detection with an anti-kappa chain antibody or an anti-human Fc antibody.

[0477] FIG. 45 shows the correspondence between the molecular weight of each band obtained by protease treatment of the antibody sample and its putative structure, as described in Reference Example 7-2. It is also noted below the structure of each molecule whether the molecule may react with an anti-kappa chain antibody or an anti-Fc antibody (whether a band is detected in the electrophoresis of FIG. 44).

[0478] FIG. 46 shows the results of assaying the CD3-mediated agonist activity of an anti-CD3 antibody molecule (OKT3), modified antibody molecules produced by linking the Fab-Fab of that antibody molecule via an additional disulfide bond (H_T135C, H_S136C, H_S191C, and L_K126C), and an anti-KLH antibody molecule (IC17) (negative control), as described in Reference Example 13-4.

[0479] FIG. 47 shows the results of assaying the CD3-mediated agonist activity of an anti-CD3 antibody molecule (OKT3), a modified antibody molecule produced by introducing Knobs-into-Holes (KiH) modifications, which facilitate heterodimerization, into the heavy chain constant region of OKT3 (OKT3_KiH), modified antibody molecules produced by linking the Fab-Fab of that antibody molecule via an additional disulfide bond (H_S191C_KiH, H_S191C/V188C_KiH, H_S191C/P189C_KiH, H_S191C/S190C_KiH, H_S191C/S192C_KiH, H_S191C/L193C_KiH, H_S191C/G194C_KiH), and an anti-KLH antibody (IC17) (negative control), as described in Reference Example 14-4.

[0480] FIG. 48 shows the results of assaying the CD3-mediated agonist activity of an anti-CD3 antibody molecule (OKT3), a modified antibody molecule produced by linking the Fab-Fab of that antibody molecule via an additional disulfide bond (H_S191C), a modified antibody molecule produced by introducing Knobs-into-Holes (KiH) modifications, which facilitate heterodimerization, into the heavy chain constant region of OKT3 (OKT3_KiH), a modified antibody molecule produced by linking the Fab-Fab of that antibody molecule via an additional disulfide bond (H_S191C_KiH), modified antibody molecules produced by introducing a positively-charged amino acid substitution into one of the heavy chain constant regions of OKT3_KiH and introducing a negatively-charged amino acid substitution into the other heavy chain constant region (0004//0004, 0004//0006), modified antibody molecules produced by introducing a positively- or negatively-charged amino acid substitution into one of the heavy chain constant regions of OKT3_KiH (0004//OKT3, OKT3//0004, OKT3//0006), and an anti-KLH antibody molecule (IC17) (negative control), as described in Reference Example 15-4.

[0481] FIG. 49 shows the results of assaying the CD3-mediated agonist activity of an anti-CD3 antibody molecule (OKT3), modified antibody molecules produced by removing a disulfide bond in the hinge region of that antibody molecule (dh1, dh2, dh3), modified antibody molecules produced by linking the Fab-Fab of those molecules via an additional disulfide bond (H_S191C_dh1, H_S191C_dh2, H_S191C_dh3), and an anti-KLH antibody molecule (IC17) (negative control) as described in Reference Example 16-4.

[0482] FIG. 50 shows the results of assaying the CD3-mediated agonist activity of an anti-CD3 monospecific antibody molecule (OKT3-G1s), a modified antibody molecule produced by linking the Fab-Fab of that antibody molecule via an additional disulfide bond (OKT3-G1sHH), a modified antibody molecule produced by linking the Fab-Fab of an anti-CD3 monospecific antibody (CD3-G1s) via an additional disulfide bond (CD3-G1sLL), an anti-CD3 biparatopic antibody molecule (CD3//OKT3-G1s), modified antibody molecules produced by linking the Fab-Fab of that antibody molecule via an additional disulfide bond (CD3//OKT3-G1sHH, CD3//OKT3-G1sLH), and a combination of CD3-G1sLL and OKT3-G1s (CD3-G1sLL+OKT3-G1s), as described in Reference Example 20.

[0483] FIG. 51A shows the results of assaying the CD3- and/or PD1-mediated agonist activity of anti-CD3×anti-PD1 bispecific antibodies and modified antibody molecules produced by linking the Fab-Fab of those antibodies via an additional disulfide bond, as described in Reference Example 22-1. FIG. 51A shows the agonist activity of an anti-CD3×anti-PD1 bispecific antibody molecule (OKT3//117-G1silent) which is composed of an anti-CD3 antibody (OKT3) and an anti-PD1 antibody (117), and modified antibody molecules produced by linking the Fab-Fab of that antibody molecule via an additional disulfide bond (OKT3//117-G1silentHH, OKT3//117-G1silentHL, OKT3//117-G1silentLL).

[0484] FIG. 51B shows the results of assaying the CD3- and/or PD1-mediated agonist activity of anti-CD3×anti-PD1 bispecific antibodies and modified antibody molecules produced by linking the Fab-Fab of those antibodies via an additional disulfide bond, as described in Reference Example 22-1. FIG. 51B shows the agonist activity of an anti-CD3×anti-PD1 bispecific antibody molecule (OKT3//10-G1silent) which is composed of an anti-CD3 antibody (OKT3) and an anti-PD1 antibody (10), and modified antibody molecules produced by linking the Fab-Fab of that antibody molecule via an additional disulfide bond (OKT3//10-G1silentHH, OKT3//10-G1silentHL).

[0485] FIG. 51C shows the results of assaying the CD3- and/or PD1-mediated agonist activity of anti-CD3×anti-PD1 bispecific antibodies and modified antibody molecules produced by linking the Fab-Fab of those antibodies via an additional disulfide bond, as described in Reference Example 22-1. FIG. 51C shows the agonist activity of an anti-CD3×anti-PD1 bispecific antibody molecule (CD3//949-G1silent) which is composed of an anti-CD3 antibody (CD3) and an anti-PD1 antibody (949), and modified antibody molecules produced by linking the Fab-Fab of that antibody molecule via an additional disulfide bond (CD3//949-G1silentLH, CD3//949-G1silentHH, CD3//949-G1silentLL, CD3//949-G1silentHL).

[0486] FIG. 51D shows the results of assaying the CD3- and/or PD1-mediated agonist activity of anti-CD3×anti-PD1 bispecific antibodies and modified antibody molecules produced by linking the Fab-Fab of those antibodies via an additional disulfide bond, as described in Reference Example 22-1. FIG. 51D shows the agonist activity of an anti-CD3×anti-PD1 bispecific antibody molecule (OKT3//949-G1silent) which is composed of an anti-CD3 antibody (OKT3) and an anti-PD1 antibody (949), and modified antibody molecules produced by linking the Fab-Fab of that antibody molecule via an additional disulfide bond (OKT3//949-G1silentHL, OKT3//949-G1silentHH, OKT3//949-G1silentLL).

[0487] FIG. 52 shows the results of assaying the CD3- and/or PD1-mediated agonist activity of an anti-CD3×anti-PD1 bispecific antibody molecule (OKT3//949-G1silent) which is composed of an anti-CD3 antibody (OKT3) and an anti-PD1 antibody (949), and modified antibody molecules produced by linking the Fab-Fab of that antibody molecule via an additional disulfide bond (OKT3//949-G1silentHH, OKT3//949-G1silentHL, OKT3//949-G1silentLH, OKT3//949-G1silentLL), as described in Reference Example 22-2.

[0488] FIG. 53A shows the results of evaluating the T cell-dependent inhibitory effect on cancer cell growth when using a CD28/CD3 clamping bispecific antibody and a GPC3/binding-attenuated CD3 bispecific antibody in combination, as described in Reference Example 23-1. When the above-mentioned CD28/CD3 clamping bispecific antibody and GPC3/binding-attenuated CD3 bispecific antibody are combined and allowed to act in the presence of target cells (GPC3-expressing cancer cells) and effector cells (T cells), the GPC3/binding-attenuated CD3 bispecific antibody brings the target cell and the effector cell close together, and the CD28/CD3 clamping bispecific antibody activates the effector cell. FIG. 53A shows the inhibitory effect on cancer cell growth when a GPC3/binding-attenuated CD3 bispecific antibody molecule (GPC3/attCE115) was used as an antibody to target T cells to cancer cells, and a GPC3/CD3 clamping bispecific antibody molecule (GPC3/clamp CD3), a KLH/CD3 clamping bispecific antibody molecule (KLH/clamp CD3), a CD28/CD3 clamping bispecific antibody molecule (CD28/clamp CD3), or a modified antibody molecule produced by linking the Fab-Fab of that antibody molecule via an additional disulfide bond (CD28/clamp CD3_HH) was used as an antibody for activating T cells.

[0489] FIG. 53B shows, as with FIG. 53A, the results of evaluating the T cell-dependent inhibitory effect on cancer cell growth when using a CD28/CD3 clamping bispecific antibody and a GPC3/binding-attenuated CD3 bispecific antibody in combination, as described in Reference Example 23-1. FIG. 53B shows the inhibitory effect on cancer cell growth when a modified antibody molecule produced by linking the Fab-Fab of the GPC3/binding-attenuated CD3 bispecific antibody via an additional disulfide bond (GPC3/attCE115_LL) was used as an antibody to target T cells to cancer cells, and a GPC3/CD3 clamping bispecific antibody molecule (GPC3/clamp CD3), a KLH/CD3 clamping bispecific antibody molecule (KLH/clamp CD3), a CD28/CD3 clamping bispecific antibody molecule (CD28/clamp CD3), or a modified antibody molecule produced by linking the Fab-Fab of that antibody molecule via an additional disulfide bond (CD28/clamp CD3_HH) was used as an antibody for activating T cells.

[0490] FIG. 54A shows the results of evaluating cytokine production from T cells when a CD28/CD3 clamping bispecific antibody and a GPC3/binding-attenuated CD3 bispecific antibody were used in combination as described in Reference Example 23-2. When the above-mentioned CD28/CD3 clamping bispecific antibody and GPC3/binding-attenuated CD3 bispecific antibody are used in combination in the presence of target cells (GPC3-expressing cancer cells) and effector cells (T cells), the GPC3/binding-attenuated CD3 bispecific antibody brings the target cell and the effector cell close together, and the CD28/CD3 clamping bispecific antibody activates the effector cell. FIG. 54A shows the level of IL-6 production when a GPC3/binding-attenuated CD3 bispecific antibody molecule (GPC3/attCE115) and a modified antibody molecule produced by linking the Fab-Fab of the CD28/CD3 clamping bispecific antibody via an additional disulfide bond (CD28/clamp CD3_HH) were used each alone or in combination in the presence of target cells (GPC3-expressing cancer cells) and effector cells (T cells).

[0491] FIG. 54B shows, as with FIG. 54A, the results of evaluating cytokine production from T cells when a CD28/CD3 clamping bispecific antibody and a GPC3/binding-attenuated CD3 bispecific antibody were used in combination as described in Reference Example 23-2. FIG. 54B shows the level of IL-6 production when a GPC3/binding-attenuated CD3 bispecific antibody molecule (GPC3/attCE115) and a modified antibody molecule produced by linking the Fab-Fab of the CD28/CD3 clamping bispecific antibody via an additional disulfide bond (CD28/clamp CD3_HH) were used each alone or in combination in the presence of effector cells (T cells) only.

[0492] FIG. 54C shows, as with FIG. 54A, the results of evaluating cytokine production from T cells when a CD28/CD3 clamping bispecific antibody and a GPC3/binding-attenuated CD3 bispecific antibody were used in combination as described in Reference Example 23-2. FIG. 54C shows the cancer cell growth inhibitory effect when a GPC3/binding-attenuated CD3 bispecific antibody molecule (GPC3/attCE115) and a modified antibody molecule produced by linking the Fab-Fab of the CD28/CD3 clamping bispecific antibody via an additional disulfide bond (CD28/clamp CD3_HH) were used each alone or in combination in the presence of target cells (GPC3-expressing cancer cells) and effector cells (T cells).

[0493] FIG. 55A is a schematic diagram showing the mechanism of action of the T cell-dependent cancer cell growth inhibition when a CD28/CD3 clamping bispecific antibody and a GPC3/binding-attenuated CD3 bispecific antibody are used in combination, as described in Reference Examples 23-1 (“epsilon” in the diagrams indicates CD3 epsilon). FIG. 55A shows the mechanism of action of the cancer cell growth inhibition when a CD28/CD3 clamping bispecific antibody and a GPC3/binding-attenuated CD3 bispecific antibody are used in combination in the presence of target cells (GPC3-expressing cancer cells) and effector cells (T cells).

[0494] FIG. 55B is a schematic diagram showing the mechanism of action of the T cell-dependent cancer cell growth inhibition when a CD28/CD3 clamping bispecific antibody and a GPC3/binding-attenuated CD3 bispecific antibody are used in combination, as described in Reference Examples 23-1 (epsilon in the diagrams indicates CD3 epsilon). FIG. 55B shows the mechanism of action of the cancer cell growth inhibition when a modified antibody molecule which has been modified to introduce an additional disulfide bond into the Fab-Fab of a CD28/CD3 clamping bispecific antibody, and a GPC3/binding-attenuated CD3 bispecific antibody, are used in combination in the presence of target cells (GPC3-expressing cancer cells) and effector cells (T cells).

[0495] FIG. 56A is a schematic diagram showing the mechanism of action of the cytokine production from T cells when a CD28/CD3 clamping bispecific antibody and a GPC3/binding-attenuated CD3 bispecific antibody are used in combination, as described in Reference Examples 23-2 (epsilon in the diagrams indicates CD3 epsilon). FIG. 56A shows the mechanism of action of the cytokine production when a modified antibody molecule which has been modified to introduce an additional disulfide bond into the Fab-Fab of a CD28/CD3 clamping bispecific antibody, and a GPC3/binding-attenuated CD3 bispecific antibody, are used in combination in the presence of target cells (GPC3-expressing cancer cells) and effector cells (T cells).

[0496] FIG. 56B is a schematic diagram showing the mechanism of action of the cytokine production from T cells when a CD28/CD3 clamping bispecific antibody and a GPC3/binding-attenuated CD3 bispecific antibody are used in combination, as described in Reference Examples 23-2 (epsilon in the diagrams indicates CD3 epsilon). FIG. 56B shows the mechanism of action of the cytokine production when a modified antibody molecule which has been modified to introduce an additional disulfide bond into the Fab-Fab of a CD28/CD3 clamping bispecific antibody, and a GPC3/binding-attenuated CD3 bispecific antibody, are used in combination in the presence of effector cells (T cells) only.

[0497] FIG. 57A shows the results of assaying the agonist activity of a CD8/CD28 bispecific antibody molecule (CD8/CD28-P587), and modified antibody molecules produced by linking the Fab-Fab of that antibody via an additional disulfide bond (CD8/CD28-P587(HH), CD8/CD28-P587(LL), CD8/CD28-P587(HL), CD8/CD28-P587(LH)) as described in Reference Example 24. An anti-KLH antibody molecule (KLH-P587) was used as a negative control. The results obtained by using peripheral blood mononuclear cells (PBMC) from two different donors are shown (upper panel: donor A, lower panel: donor B). FIG. 57A shows the proportion of divided regulatory T cells (Treg) in PBMCs.

[0498] FIG. 57B shows the results of assaying the agonist activity of a CD8/CD28 bispecific antibody molecule (CD8/CD28-P587), and modified antibody molecules produced by linking the Fab-Fab of that antibody via an additional disulfide bond (CD8/CD28-P587(HH), CD8/CD28-P587(LL), CD8/CD28-P587(HL), CD8/CD28-P587(LH)) as described in Reference Example 24. FIG. 57B shows the proportion of divided CD8 alpha-positive T cells in PBMCs.

[0499] FIG. 58 shows chromatograms of cation exchange chromatography (CIEX) performed on the antibody sample of OKT3 variants with charged amino acid substitution as described in Example 9-3.

[0500] FIG. 59 shows chromatograms of cation exchange chromatography (CIEX) performed on the antibody sample of OKT3 variants with charged amino acid substitution as described in Examples 2-2 and Examples 9-3.

[0501] FIG. 60 shows a scatter diagram of lower band-to-upper band ratio (non-reducing SDS-PAGE gel image) of OKT3 and MRA antibody variants produced in Example 10-1. Y-axis represents the ratio of the lower band to upper band of MRA variants sample as shown in Table 87, whereas X-axis represents the ratio of the lower band to upper band of OKT3 variants sample as shown in Table 87.

[0502] FIG. 61A shows chromatograms of cation exchange chromatography (CIEX) performed on the antibody sample of OKT3 variants with charged amino acid substitution as described in Example 10-3.

[0503] FIG. 61B shows chromatograms of cation exchange chromatography (CIEX) performed on the antibody sample of MRA variants with charged amino acid substitution as described in Example 10-3.

[0504] FIG. 62A is a schematic diagram showing the effect of additional amino acid mutation for enhancement of Fab crosslinking of the engineered disulfide bond. (Left) G1T4.S191C variant with cysteine substitution e.g. at the S191C of CH1 (EU numbering) contain mixtures of cross-linked and non-cross-linked antibodies. (Middle) G1T4.S191C variants which comprise additional amino acid mutation X (X can be either charged amino acid, hydrophobic amino acid or Knob-hole amino acids) shows higher proportion of cross-linked antibodies. (Right) Amino acid position at CH1-CH1 interface (EU numbering) in which additional amino acid mutation X (X can be either charged amino acid, hydrophobic amino acid or Knob-hole amino acids) can facilitate the crosslinking of the engineered disulfide bond.

[0505] FIG. 62B is a schematic diagram showing the effect of additional mutation for separation between crosslinked and non-crosslinked Fabs by chromatography methods such as CIEX.

### DESCRIPTION OF EMBODIMENTS

### I. Definitions

[0506] Herein, the term “antigen-binding molecule” refers, in its broadest sense, to a molecule that specifically binds to an antigenic determinant (epitope). In one embodiment, the antigen-binding molecule is an antibody, antibody fragment, or antibody derivative. In one embodiment, the antigen-binding molecule is a non-antibody protein, or a fragment thereof, or a derivative thereof.

[0507] Herein, “antigen-binding domain” refers to a region that specifically binds and is complementary to the whole or a portion of an antigen. Herein, an antigen-binding molecule comprises an antigen-binding domain. When the molecular weight of an antigen is large, an antigen-binding domain can only bind to a particular portion of the antigen. The particular portion is called “epitope”. In one embodiment, an antigen-binding domain comprises an antibody fragment which binds to a particular antigen. An antigen-binding domain can be provided from one or more antibody variable domains. In a non-limiting embodiment, the antigen-binding domains comprise both the antibody light chain variable region (VL) and antibody heavy chain variable region (VH). Examples of such antigen-binding domains include “single-chain Fv (scFv)”, “single-chain antibody”, “Fv”, “single-chain Fv2 (scFv2)”, “Fab”, and “Fab′”. In other embodiments, an antigen-binding domain comprises a non-antibody protein which binds to a particular antigen, or a fragment thereof. In a specific embodiment, an antigen-binding domain comprises a hinge region.

[0508] In the present invention, “specifically binds” means binding in a state where one of the molecules involved in specific binding does not show any significant binding to molecules other than a single or a number of binding partner molecules. Furthermore, it is also used when an antigen-binding domain is specific to a particular epitope among multiple epitopes contained in an antigen. When an epitope bound by an antigen-binding domain is contained in multiple different antigens, antigen-binding molecules comprising the antigen-binding domain can bind to various antigens that have the epitope.

[0509] In the present disclosure, the recitation “binds to the same epitope” means that the epitopes to which two antigen-binding domains bind at least partially overlap each other. The degree of the overlap is, but not limited to, at least 10% or more, preferably 20% or more, 30% or more, 40% or more, 50% or more, 60% or more, 70% or more, and 80% or more, particularly preferably 90% or more, and most preferably 100%.

[0510] The term “antibody” herein is used in the broadest sense and encompasses various antibody structures, including but not limited to monoclonal antibodies, polyclonal antibodies, multispecific antibodies (e.g., bispecific antibodies), and antibody fragments so long as they exhibit the desired antigen-binding activity.

[0511] The term “monoclonal antibody” as used herein refers to an antibody obtained from a population of substantially homogeneous antibodies, i.e., the individual antibodies composing the population are identical and/or bind the same epitope, except for possible variant antibodies, e.g., containing naturally occurring mutations or arising during production of a monoclonal antibody preparation, such variants generally being present in minor amounts. In contrast to polyclonal antibody preparations, which typically include different antibodies directed against different determinants (epitopes), each monoclonal antibody of a monoclonal antibody preparation is directed against a single determinant on an antigen. Thus, the modifier “monoclonal” indicates the character of the antibody as being obtained from a substantially homogeneous population of antibodies, and is not to be construed as requiring production of the antibody by any particular method. For example, the monoclonal antibodies to be used in accordance with the present invention may be made by a variety of techniques, including but not limited to the hybridoma method, recombinant DNA methods, phage-display methods, and methods utilizing transgenic animals containing all or part of the human immunoglobulin loci, such methods and other exemplary methods for making monoclonal antibodies being described herein.

[0512] “Native antibodies” refer to naturally occurring immunoglobulin molecules with varying structures. For example, native IgG antibodies are heterotetrameric glycoproteins of about 150,000 daltons, composed of two identical light chains and two identical heavy chains that are disulfide-bonded. From N- to C-terminus, each heavy chain has a variable region (VH), also called a variable heavy domain or a heavy chain variable domain, followed by three constant domains (CH1, CH2, and CH3). Similarly, from N- to C-terminus, each light chain has a variable region (VL), also called a variable light domain or a light chain variable domain, followed by a constant light (CL) domain. The light chain of an antibody may be assigned to one of two types, called kappa and lambda, based on the amino acid sequence of its constant domain.

[0513] The term “chimeric” antibody refers to an antibody in which a portion of the heavy and/or light chain is derived from a particular source or species, while the remainder of the heavy and/or light chain is derived from a different source or species.

[0514] The “class” of an antibody refers to the type of constant domain or constant region possessed by its heavy chain. There are five major classes of antibodies: IgA, IgD, IgE, IgG, and IgM, and several of these may be further divided into subclasses (isotypes), e.g., IgG₁, IgG₂, IgG₃, IgG₄, IgA₁, and IgA₂. The heavy chain constant domains that correspond to the different classes of immunoglobulins are called alpha, delta, epsilon, gamma, and mu, respectively.

[0515] In one embodiment of the present invention, constant regions are preferably antibody constant regions, more preferably IgG1, IgG2, IgG3, and IgG4-type antibody constant regions, and even more preferably human IgG1, IgG2, IgG3, and IgG4-type antibody constant regions. Furthermore, in another embodiment of the present invention, constant regions are preferably heavy chain constant regions, more preferably IgG1, IgG2, IgG3, and IgG4-type heavy chain constant regions, and even more preferably human IgG1, IgG2, IgG3, and IgG4-type heavy chain constant regions. The amino acid sequences of the human IgG1 constant region, the human IgG2 constant region, the human IgG3 constant region, and the human IgG4 constant region are known. For the constant regions of human IgG1, human IgG2, human IgG3, and human IgG4, a plurality of allotype sequences with genetic polymorphism are described in Sequences of proteins of immunological interest, NIH Publication No. 91-3242, and any of them can be used in the present invention. Amino acid-modified constant regions of the present invention may contain other amino acid mutations or modifications, as long as they include an amino acid mutation of the present invention.

[0516] The term “hinge region” denotes an antibody heavy chain polypeptide portion in a wild-type antibody heavy chain that joins the CH1 domain and the CH2 domain, e.g., from about position 216 to about position 230 according to the EU numbering system, or from about position 226 to about position 243 according to the Kabat numbering system. It is known that in a native IgG antibody, cysteine residue at position 220 according to EU numbering in the hinge region forms a disulfide bond with cysteine residue at position 214 in the antibody light chain. It is also known that between the two antibody heavy chains, disulfide bonds are formed between cysteine residues at position 226 and between cysteine residues at position 229 according to EU numbering in the hinge region. In general, a “hinge region” is defined as extending from human IgG1 from 216 to 238 (EU numbering) or from 226 to 251 (Kabat numbering). This hinge can be further divided into three different regions, an upper hinge, a central hinge and a lower hinge. In human IgG1 antibodies, these regions are generally defined as follows:
[0517] Upper hinge: 216-225 (EU numbering) or 226-238 (Kabat numbering),
[0518] Central hinge: 226-230 (EU numbering) or 239-243 (Kabat numbering),
[0519] Lower hinge: 231-238 (EU numbering) or 244-251 (Kabat numbering).

[0520] The hinge region of other IgG isotypes can be aligned with the IgG1 sequence by placing the first and last cysteine residues that form an interheavy chain SS bond in the same position (e.g., Brekke et al., 1995, Immunol (See Table 1 of Today 16: 85-90). A hinge region herein includes wild-type hinge regions as well as variants in which amino acid residue(s) in a wild-type hinge region is altered by substitution, addition, or deletion.

[0521] The term “disulfide bond formed between amino acids which are not in a hinge region” (or “disulfide bond formed between amino acids outside of a hinge region”) means disulfide bond formed, connected or linked through amino acids located in any antibody region which is outside of the “hinge region” defined above. For example, such disulfide bond is formed, connected or linked through amino acids in any position in an antibody other than in a hinge region (e.g., from about position 216 to about position 230 according to the EU numbering system, or from about position 226 to about position 243 according to the Kabat numbering system). In some embodiments, such disulfide bond is formed, connected or linked through amino acids located in a CH1 region, a CL region, a VL region, a VH region and/or a VHH region. In some embodiments, such disulfide bond is formed, connected or linked through amino acids located in positions 119 to 123, 131 to 140, 148 to 150, 155 to 167, 174 to 178, 188 to 197, 201 to 214, according to EU numbering, in the CH1 region. In some embodiments, such disulfide bond is formed, connected or linked through amino acids located in positions 119, 122, 123, 131, 132, 133, 134, 135, 136, 137, 138, 139, 140, 148, 150, 155, 156, 157, 159, 160, 161, 162, 163, 164, 165, 167, 174, 176, 177, 178, 188, 189, 190, 191, 192, 193, 194, 195, 196, 197, 201, 203, 205, 206, 207, 208, 211, 212, 213, 214 according to EU numbering, in the CH1 region. In some embodiments, such disulfide bond is formed, connected or linked through amino acids located in positions 188, 189, 190, 191, 192, 193, 194, 195, 196, and 197, according to EU numbering, in the CH1 region. In one preferred embodiment, such disulfide bond is formed, connected or linked through amino acids located in position 191, according to EU numbering, in the CH1 region.

[0522] The term “Fc region” herein is used to define a C-terminal region of an immunoglobulin heavy chain that contains at least a portion of the constant region. The term includes native sequence Fc regions and variant Fc regions. In one embodiment, a human IgG heavy chain Fc region extends from Cys226, or from Pro230, to the carboxyl-terminus of the heavy chain. However, the C-terminal lysine (Lys447) or glycine-lysine (residues 446-447) of the Fc region may or may not be present. Unless otherwise specified herein, numbering of amino acid residues in the Fc region or constant region is according to the EU numbering system, also called the EU index, as described in Kabat et al., Sequences of Proteins of Immunological Interest, 5th Ed. Public Health Service, National Institutes of Health, Bethesda, M D, 1991.

[0523] “Effector functions” refer to those biological activities attributable to the Fc region of an antibody, which vary with the antibody isotype. Examples of antibody effector functions include: C1q binding and complement dependent cytotoxicity (CDC); Fc receptor binding; antibody-dependent cell-mediated cytotoxicity (ADCC); phagocytosis; down regulation of cell surface receptors (e.g. B cell receptor); and B cell activation.

[0524] The term “Fc receptor” or “FcR” refers to a receptor that binds to the Fc region of an antibody. In some embodiments, an FcR is a native human FcR. In some embodiments, an FcR is one which binds an IgG antibody (a gamma receptor) and includes receptors of the Fc gamma RI, Fc gamma RII, and Fc gamma RIII subclasses, including allelic variants and alternatively spliced forms of those receptors. Fc gamma RII receptors include Fc gamma RIIA (an “activating receptor”) and Fc gamma RIIB (an “inhibiting receptor”), which have similar amino acid sequences that differ primarily in the cytoplasmic domains thereof. Activating receptor Fc gamma RIIA contains an immunoreceptor tyrosine-based activation motif (ITAM) in its cytoplasmic domain. Inhibiting receptor Fc gamma RIIB contains an immunoreceptor tyrosine-based inhibition motif (ITIM) in its cytoplasmic domain. (see, e.g., Daeron, Annu. Rev. Immunol. 15:203-234 (1997)). FcRs are reviewed, for example, in Ravetch and Kinet, Annu. Rev. Immunol 9:457-92 (1991); Capel et al., Immunomethods 4:25-34 (1994); and de Haas et al., J. Lab. Clin. Med. 126:330-41 (1995). Other FcRs, including those to be identified in the future, are encompassed by the term “FcR” herein.

[0525] The term “Fc receptor” or “FcR” also includes the neonatal receptor, FcRn, which is responsible for the transfer of maternal IgGs to the fetus (Guyer et al., J. Immunol. 117:587 (1976) and Kim et al., J. Immunol. 24:249 (1994)) and regulation of homeostasis of immunoglobulins. Methods of measuring binding to FcRn are known (see, e.g., Ghetie and Ward., Immunol. Today 18(12):592-598 (1997); Ghetie et al., Nature Biotechnology, 15(7):637-640 (1997); Hinton et al., J. Biol. Chem. 279(8):6213-6216 (2004); WO 2004/92219 (Hinton et al.).

[0526] The term “variable region” or “variable domain” refers to the domain of an antibody heavy or light chain that is involved in binding the antibody to antigen. The variable domains of the heavy chain and light chain (VH and VL, respectively) of a native antibody generally have similar structures, with each domain comprising four conserved framework regions (FRs) and three hypervariable regions (HVRs). (See, e.g., Kindt et al. Kuby Immunology, 6^{th} ed., W.H. Freeman and Co., page 91 (2007).) A single VH or VL domain may be sufficient to confer antigen-binding specificity. Furthermore, antibodies that bind a particular antigen may be isolated using a VH or VL domain from an antibody that binds the antigen to screen a library of complementary VL or VH domains, respectively. See, e.g., Portolano et al., J. Immunol. 150:880-887 (1993); Clarkson et al., Nature 352:624-628 (1991).

[0527] The term “hypervariable region” or “HVR” as used herein refers to each of the regions of an antibody variable domain which are hypervariable in sequence (“complementarity determining regions” or “CDRs”) and/or form structurally defined loops (“hypervariable loops”) and/or contain the antigen-contacting residues (“antigen contacts”). Generally, antibodies comprise six HVRs: three in the VH (H1, H2, H3), and three in the VL (L1, L2, L3). Exemplary HVRs herein include:
[0528] (a) hypervariable loops occurring at amino acid residues 26-32 (L1), 50-52 (L2), 91-96 (L3), 26-32 (H1), 53-55 (H2), and 96-101 (H3) (Chothia and Lesk, J. Mol. Biol. 196:901-917 (1987));
[0529] (b) CDRs occurring at amino acid residues 24-34 (L1), 50-56 (L2), 89-97 (L3), 31-35b (H1), 50-65 (H2), and 95-102 (H3) (Kabat et al., Sequences of Proteins of Immunological Interest, 5th Ed. Public Health Service, National Institutes of Health, Bethesda, MD (1991));
[0530] (c) antigen contacts occurring at amino acid residues 27c-36 (L1), 46-55 (L2), 89-96 (L3), 30-35b (H1), 47-58 (H2), and 93-101 (H3) (MacCallum et al. J. Mol. Biol. 262: 732-745 (1996)); and
[0531] (d) combinations of (a), (b), and/or (c), including HVR amino acid residues 46-56 (L2), 47-56 (L2), 48-56 (L2), 49-56 (L2), 26-35 (H1), 26-35b (H1), 49-65 (H2), 93-102 (H3), and 94-102 (H3).

[0532] Unless otherwise indicated, HVR residues and other residues in the variable domain (e.g., FR residues) are numbered herein according to Kabat et al., supra.

[0533] “Framework” or “FR” refers to variable domain residues other than hypervariable region (HVR) residues. The FR of a variable domain generally consists of four FR domains: FR1, FR2, FR3, and FR4. Accordingly, the HVR and FR sequences generally appear in the following sequence in VH (or VL): FR1-H1(L1)-FR2-H2(L2)-FR3-H3(L3)-FR4.

[0534] The terms “full length antibody,” “intact antibody,” and “whole antibody” are used herein interchangeably to refer to an antibody having a structure substantially similar to a native antibody structure or having heavy chains that contain an Fc region as defined herein.

[0535] The terms “host cell,” “host cell line,” and “host cell culture” are used interchangeably and refer to cells into which exogenous nucleic acid has been introduced, including the progeny of such cells. Host cells include “transformants” and “transformed cells,” which include the primary transformed cell and progeny derived therefrom without regard to the number of passages. Progeny may not be completely identical in nucleic acid content to a parent cell, but may contain mutations. Mutant progeny that have the same function or biological activity as screened or selected for in the originally transformed cell are included herein.

[0536] The term “vector,” as used herein, refers to a nucleic acid molecule capable of propagating another nucleic acid to which it is linked. The term includes the vector as a self-replicating nucleic acid structure as well as the vector incorporated into the genome of a host cell into which it has been introduced. Certain vectors are capable of directing the expression of nucleic acids to which they are operatively linked. Such vectors are referred to herein as “expression vectors.”

[0537] A “human antibody” is one which possesses an amino acid sequence which corresponds to that of an antibody produced by a human or a human cell or derived from a non-human source that utilizes human antibody repertoires or other human antibody-encoding sequences. This definition of a human antibody specifically excludes a humanized antibody comprising non-human antigen-binding residues.

[0538] A “humanized” antibody refers to a chimeric antibody comprising amino acid residues from non-human HVRs and amino acid residues from human FRs. In certain embodiments, a humanized antibody will comprise substantially all of at least one, and typically two, variable domains, in which all or substantially all of the HVRs (e.g., CDRs) correspond to those of a non-human antibody, and all or substantially all of the FRs correspond to those of a human antibody. A humanized antibody optionally may comprise at least a portion of an antibody constant region derived from a human antibody. A “humanized form” of an antibody, e.g., a non-human antibody, refers to an antibody that has undergone humanization.

[0539] An “antibody fragment” refers to a molecule other than an intact antibody that comprises a portion of an intact antibody that binds the antigen to which the intact antibody binds. Examples of antibody fragments include but are not limited to Fv, Fab, Fab′, Fab′-SH, F(ab′)₂; diabodies; linear antibodies; single-chain antibody molecules (e.g. scFv); single chain Fabs (scFabs); single domain antibodies; and multispecific antibodies formed from antibody fragments.

[0540] By “contacting” is meant subjecting to, exposing to, in solution. The antibody, protein or polypeptide can be contacted with the reducing reagents while also bound to a solid support (e.g., an affinity column or a chromatography matrix). Preferably, the solution is buffered. In order to maximize the yield of antibody/protein with a desired conformation, the pH of the solution is chosen to protect the stability of the antibody/protein and to be optimal for disulfide exchange. In the practice of the invention, the pH of the solution is preferably not strongly acidic. Thus, some pH ranges are greater than pH 5, preferably about pH 6 to about pH 11, more preferably from about pH 7 to about pH 10, and still more preferably from about pH 6 to about pH 8. In one non-limiting embodiment of the invention, the optimal pH was found to be about pH 7. However, the optimal pH for a particular embodiment of the invention can be easily determined experimentally by those skilled in the art.

[0541] The term “reduction reagent” and “reducing agent” is used interchangeably. In some embodiments, said reducing agents are free thiols. The reducing reagent is preferably comprised of a compound from the group consisting of glutathione (GSH), dithiothreitol (DTT), 2-mercaptoethanol, 2-aminoethanethiol (2-MEA), TCEP (tris(2-carboxyethyl)phosphine), dithionitrobenzoate, cysteine and Na₂SO₃. In some embodiments, TCEP, 2-MEA, DTT, cysteine, GSH or Na₂SO₃ can be used. In some preferred embodiments, 2-MEA can be used. In some preferred embodiments, TCEP can be used.

[0542] The reducing agent may be added to the fermentation media in which the cells producing the recombinant protein are grown. In additional embodiments, the reducing agent also may be added to the LC mobile phase during the LC separation step for separating the recombinant protein. In certain embodiments, the protein is immobilized to a stationary phase of the LC column and the reducing agents are part of the mobile phase. In specific embodiments, the untreated IgG antibody may elute as a heterogeneous mixture as indicated by the number of peaks. The use of the reduction/oxidation coupling reagent produces a simpler and more uniform peak pattern. It is contemplated that this more uniform peak of interest may be isolated as a more homogeneous preparation of the IgG.

[0543] The reducing agent is present at a concentration that is sufficient to increase the relative proportion of the desired conformation (e.g., the “paired cysteines” form of an antibody which has one or more engineered disulfide bond(s) formed between the two Fabs of the antibody, e.g., between amino acid residues which are not in the hinge region). The optimal absolute concentration and molar ratio of the reducing agent depends upon the concentration of total IgG and in some circumstances the specific IgG subclass. When used for preparing IgG1 molecules it also will depend on the number and accessibility of the unpaired cysteines in the protein. Generally, the concentration of free thiols from the reducing agent can be from about 0.05 mM to about 100 mM, more preferably about 0.1 mM to about 50 mM, and still more preferably about 0.2 mM to about 20 mM. In some preferred embodiments, the concentration of the reducing agent is 0.01, 0.05, 0.1, 0.25, 0.5, 1, 2.5, 5, 10, 25, 50, 100 mM. In some preferred embodiments, 0.05 mM to 1 mM of 2-MEA can be used. In some preferred embodiments, 0.01 mM to 25 mM TCEP can be used.

[0544] Contacting the preparation of recombinant protein with a reducing agent is performed for a time sufficient to increase the relative proportion of the desired conformation. Any relative increase in proportion is desirable, including for, example, at least 10%, 20%, 30%, 40%, 50%, 60%, 70% and even 80% or 90% of the protein with an undesired conformation is converted to protein with the desired conformation. The contacting may be performed by providing the reducing agent to the fermentation medium in which the protein is being generated. Alternatively, the contacting takes place upon partial purification of the protein from the cell culture in which it is generated. In still other embodiments, the contacting is performed after the protein has been eluted from the chromatography column but before any further processing. Essentially, the contacting may be performed at any stage during preparation, purification, storage or formulation of the antibody. In some embodiments, partial purification by affinity chromatography (e.g., Protein A chromatography) may be conducted prior to the contacting.

[0545] The contacting may be also performed with antibodies attached to a stationary phase of a chromatographic columns, while the reducing agent are a part of the mobile phase; In this case the contacting may be performed as a part of chromatographic purification procedure. Examples of representative chromatographic refolding processes may include size exclusion (SEC); solvent exchange during reversible adsorption on protein A column; hydrophobic interaction chromatography (HIC); immobilized metal affinity chromatography (IMAC); reversed-phase chromatography (RPC); use of immobilized folding catalyst, such as GroE1, GroES or other proteins with folding properties. The on-column refolding is attractive because it is easily automated using commercially available preparative chromatographic systems. The refolding on column of recombinant proteins produced in microbial cell was recently reviewed in (Li et al., 2004).

[0546] If the contacting step is performed on a partially or highly purified preparation of recombinant protein, the contacting step can be performed for as short as about 1 hour to about 4 hours, and as long as about 6 hours to about 4 days. It has been found that a contacting step of about 2 to about 48 hours, or about 16 hours works well. The contacting step can also take place during another step, such as on a solid phase or during filtering or any other step in purification.

[0547] The methods of the invention can be performed over a wide temperature range. For example, the methods of the invention have been successfully carried out at temperatures from about 4 degrees Celsius (“degrees C.”) to about 37 degrees C., however the best results were achieved at lower temperatures. A typical temperature for contacting a partially or fully purified preparation of the recombinant protein is about 4 degrees C. to about 25 degrees C. (ambient), or preferably at 23 degrees C., but can also be performed at lower temperatures and at higher temperature.

[0548] In addition, it is contemplated that the method may be performed at high pressure. Previously, high hydrostatic pressures (1000-2000 bar), combined with low, nondenaturing concentrations of guanidine hydrochloride below 1M has been used to disaggregate (solubilize) and refold several denatured proteins produced by E-coli as inclusion bodies that included human growth hormone and lysozyme, and b-lactamase (St John et al., Proc Natl Acad Sci USA, 96:13029-13033 (1999)). B-lactamase was refolded at high yields of active protein, even without added GdmHCl. In another study (Seefeldt et al., Protein Sci, 13:2639-2650 (2004)), the refolding yield of mammalian cell produced protein bikunin obtained with high pressure modulated refolding at 2000 bas was 70% by RP HPLC, significantly higher than the value of 55% (by RP-HPLC) obtained with traditional guanidine hydrochloride “dilution-refolding”. These findings indicate that high hydrostatic pressure facilitates disruption of inter- and intra-molecular interactions, leading to protein unfolding and disaggregation. The interaction of the high pressure on protein is similar to the interaction of proteins with chaotropic agents. Thus, it is contemplated that in the methods of the invention, instead of using chaotropic agents, high pressure is used for protein unfolding. Of course, a combination of high pressure and chaotropic agents also may be used in some instances.

[0549] The preparation of recombinant antibody/protein can be contacted with the reducing agent in various volumes as appropriate. For example, the methods of the invention have been carried out successfully at the analytical laboratory-scale (1-50 mL), preparative-scale (50 mL-10 L) and manufacturing-scale (10 L or more). The methods of the invention can be carried out on both small and large scale with reproducibility. As such, the concentration of antibody may be an industrial quantity (in terms of weight in grams) (e.g., an industrial amount of a specific IgG) or alternatively may be in milligram quantities. In specific embodiments, the concentration of the recombinant antibody in the reaction mixture is from about 1 mg/ml and about 50 mg/ml, more specifically, 10 mg/ml, 15 mg/ml or 20 mg/ml. The recombinant IgG1 molecules in these concentrations are particularly contemplated.

[0550] In certain embodiments, the proteins produced using media contain reducing agent are further processed in a separate processing step which employs chaotropic denaturants such as, for example, sodium dodecyl sulfate (SDS), urea or guanidium hydrochloride (GuHCl). Significant amounts of chaotropic agents are needed to observe perceptible unfolding. In some embodiments the processing step uses between 0.1M and 2 M chaotrope that produces an effect equivalent to the use of 0.1 M to 2M guanidine hydrochloride. In a specific embodiment, the oxidative refolding is achieved in the presence of approximately 1.0 M guanidine hydrochloride or an amount of other chaotropic agent that produces the same or similar amount of refolding as 1M guanidine hydrochloride. In some embodiments, the methods use between about 1.5 M and 0.5 M chaotrope. The amount of chaotropic agent used is based on the structural stability of the protein in the presence of the said chaotrope. One needs to have enough chaotrope present to perturb the local tertiary structure and/or quaternary structure of domain interactions of the protein, but less than that required to fully unfold secondary structure of the molecule and/or individual domains. To determine the point at which a protein will start to unfold by equilibrium denaturation, one practiced in the art would titrate a chaotrope into a solution containing the protein and monitor structure by a technique such as circular dichroism or fluorescence. There are other parameters that could be used to unfold or slightly perturb the structure of a protein that may be used instead of a chaotrope. Temperature and pressure are two fundamental parameters that have been previously used to alter the structure of a protein and may be used in place of a chaotropic agent while contacting with a redox agent. The inventors contemplate that any parameter that has been shown to denature or perturb a protein structure may be used by a person practiced in the art in place of a chaotropic agent.

[0551] Disulfide exchange can be quenched in any way known to those of skill in the art. For example, the reducing agent can be removed or its concentration can be reduced through a purification step, and/or it can be chemically inactivated by, e.g., acidifying the solution. Typically, when the reaction is quenched by acidification, the pH of the solution containing the reducing agent will be brought down below pH 7. In some embodiment, the pH is brought to below pH 6. Generally, the pH is reduced to between about pH 2 and about pH 6.

[0552] In some embodiments, removing the reducing agent may be conducted by dialysis, buffer exchange or any chromatography method described herein.

[0553] The term by “preferentially enriched (or increased)” means an increase in relative abundance of a desired form, or increase in relative proportion of a desired form, or increase the population of a desired form (structural isoform). In some embodiments, the methods described herein increase relative abundance of an antibody structural isoform such as an antibody having at least one disulfide bond formed between amino acid residues outside of the hinge region. In one embodiment, said at least one disulfide bond is formed between the amino acid residues at position 191 according to EU numbering in the respective CH1 regions of the first antigen-binding domain and the second antigen-binding domain. In certain embodiment, said methods produce a homogenous antibody preparation having at least 50%, 60%, 70%, 80%, 90%, preferably at least 95% molar ratio of said antibody having at least one disulfide bond formed outside of the hinge region.

[0554] A “homogeneous” population of an antibody means an antibody population that comprises largely a single form of the antibody, for example, at least 50%, 60%, 70%, 80% or more, preferably at least 90%, 95%, 96%, 97%, 99% or 100% of the antibody in the solution or composition is in the properly folded form. Similarly, a “homogeneous” population of an antibody having at least one disulfide bond formed outside of the hinge region means a population of said antibody which comprises largely a single, properly folded form, for example, at least 50%, 60%, 70%, 80% or more, preferably at least 90%, 95%, 96%, 97%, 99% or 100% molar ratio of said antibody having at least one disulfide bond formed outside of the hinge region. In one preferred embodiment, said “homogeneous” population of an antibody comprises at least one disulfide bond which is formed between the amino acid residues at position 191 according to EU numbering in the respective CH1 regions of the first antigen-binding domain and the second antigen-binding domain (i.e. “paired cysteines” at the position 191 according to EU number in the CH1 region).

[0555] In preferred embodiments, the methods of the present invention produce a homogeneous antibody population or a homogeneous antibody preparation by the steps described herein.

[0556] Determining whether an antibody population is homogenous, and the relative abundance or proportions of a conformation of a protein/antibody in a mixture, can be done using any of a variety of analytical and/or qualitative techniques. If the two conformations resolve differently during separation techniques such as chromatography, electrophoresis, filtering or other purification technique, then the relative proportion of a conformation in the mixture can be determined using such purification techniques. For example, at least two different conformations of the recombinant IgG could be resolved by way of hydrophobic interaction chromatography. Further, since far UV Circular Dichroism has been used to estimate secondary structure composition of proteins (Perczel et al., 1991, Protein Engrg. 4:669-679), such a technique can determine whether alternative conformations of a protein are present. Still another technique used to determine conformation is fluorescence spectroscopy which can be employed to ascertain complementary differences in tertiary structure assignable to tryptophan and tyrosine fluorescence. Other techniques that can be used to determine differences in conformation and, hence, the relative proportions of a conformation, are on-line SEC to measure aggregation status, differential scanning calorimetry to measure melting transitions (Tm's) and component enthalpies, and chaotrope unfolding. Yet another technique that can be used to determine differences in conformation and, hence, the relative proportions of a conformation is LC/MS detection to determine the heterogeneity of the protein.

[0557] Alternatively, if there is a difference in activity between the conformations of the antibody/protein, determining the relative proportion of a conformation in the mixture can be done by way of an activity assay (e.g., binding to a ligand, enzymatic activity, biological activity, etc.). Biological activity of the protein also could be used. Alternatively, the binding assays can be used in which the activity is expressed as activity units/mg of protein.

[0558] In some embodiments described in detail herein below, the invention uses IEC chromatography, to determine the heterogeneity of the antibody/protein. In such a case, the antibody is purified or considered to be “homogenous”, which means that no polypeptide peaks or fractions corresponding to other polypeptides are detectable upon analysis by IEC chromatography. In certain embodiments, the antibody is purified or considered to be “homogenous” such that no polypeptide bands corresponding to other polypeptides are detectable upon analysis by SDS-polyacrylamide gel electrophoresis (SDS-PAGE). It will be recognized by one skilled in the pertinent field that multiple bands corresponding to the polypeptide can be visualized by SDS-PAGE, due to differential glycosylation, differential post-translational processing, and the like. Most preferably, the polypeptide of the invention is purified to substantial homogeneity, as indicated by a single polypeptide band upon analysis by SDS-PAGE. The polypeptide band can be visualized by silver staining, Coomassie blue staining, and/or (if the polypeptide is radiolabeled) by auto radiography.

[0559] Herein, examples of conditions of SDS-PAGE analysis are as follows. Sample Buffer Solution without 2-mercaptoethanol (×4) may be used for preparation of electrophoresis samples. The samples may be treated for 10 minutes under the condition of specimen concentration 50 or 100 microgram/mL and 70 degrees C., and then subjected to non-reducing SDS-PAGE. In non-reducing SDS-PAGE, electrophoresis may be carried out for 90 minutes at 125 V, using a 4% SDS-PAGE gel. Then, the gel may be stained with CBB, and the gel image may be captured, and the bands may be quantified using an imaging device. In the gel image, several, for example, two bands, i.e., “upper band” and “lower band”, may be observed for an antibody variant sample. In this case, the molecular weight of the upper band may correspond to that of the parent antibody (before modification). Structural changes such as crosslinking via disulfide bonds of Fabs may be caused by cysteine substitution, which may result in the change in electrophoretic mobility. In this case, the lower band may be considered to correspond to the antibody having one or more engineered disulfide bond(s) formed between the CH1 regions. Antibody variant samples with additional cysteine substitutions may show a higher lower band to upper band ratio, compared to control samples. Additional cysteine substitutions may enhance/promote disulfide bond crosslinking of Fabs; and may increase the percentage or structural homogeneity of an antibody preparation having an engineered disulfide bond formed at a mutated position; and may decrease the percentage of an antibody preparation having no engineered disulfide bond formed at the mutated position. Herein, the term “lower band to upper band ratio” refers to a ratio between the quantities/intensities of the lower and upper bands that may be quantified during the above-mentioned SDS-PAGE experiments.

### Variable Fragment (Fv)

[0560] Herein, the term “variable fragment (Fv)” refers to the minimum unit of an antibody-derived antigen-binding domain that is composed of a pair of the antibody light chain variable region (VL) and antibody heavy chain variable region (VH). In 1988, Skerra and Pluckthun found that homogeneous and active antibodies can be prepared from the E. coli periplasm fraction by inserting an antibody gene downstream of a bacterial signal sequence and inducing expression of the gene in E. coli (Science (1988) 240(4855), 1038-1041). In the Fv prepared from the periplasm fraction, VH associates with VL in a manner so as to bind to an antigen.

scFv, Single-Chain Antibody, and Sc(Fv)2

[0561] Herein, the terms “scFv”, “single-chain antibody”, and “sc(Fv)2” all refer to an antibody fragment of a single polypeptide chain that contains variable regions derived from the heavy and light chains, but not the constant region. In general, a single-chain antibody also contains a polypeptide linker between the VH and VL domains, which enables formation of a desired structure that is thought to allow antigen binding. The single-chain antibody is discussed in detail by Pluckthun in “The Pharmacology of Monoclonal Antibodies, Vol. 113, Rosenburg and Moore, eds., Springer-Verlag, New York, 269-315 (1994)”. See also International Patent Publication WO 1988/001649; U.S. Pat. Nos. 4,946,778 and 5,260,203. In a particular embodiment, the single-chain antibody can be bispecific and/or humanized.

[0562] scFv is an antigen-binding domain in which VH and VL forming Fv are linked together by a peptide linker (Proc. Natl. Acad. Sci. U.S.A. (1988) 85(16), 5879-5883). VH and VL can be retained in close proximity by the peptide linker.

[0563] sc(Fv)2 is a single-chain antibody in which four variable regions of two VL and two VH are linked by linkers such as peptide linkers to form a single chain (J Immunol. Methods (1999) 231(1-2), 177-189). The two VH and two VL may be derived from different monoclonal antibodies. Such sc(Fv)2 preferably includes, for example, a bispecific sc(Fv)2 that recognizes two epitopes present in a single antigen as disclosed in the Journal of Immunology (1994) 152(11), 5368-5374. sc(Fv)2 can be produced by methods known to those skilled in the art. For example, sc(Fv)2 can be produced by linking scFv by a linker such as a peptide linker.

[0564] Herein, the forms of an antigen-binding domain forming an sc(Fv)2 include an antibody in which the two VH units and two VL units are arranged in the order of VH, VL, VH, and VL ([VH]-linker-[VL]-linker-[VH]-linker-[VL]) beginning from the N terminus of a single-chain polypeptide. The order of the two VH units and two VL units is not limited to the above form, and they may be arranged in any order. Example order of the form is listed below.
[0565] [VL]-linker-[VH]-linker-[VH]-linker-[VL]
[0566] [VH]-linker-[VL]-linker-[VL]-linker-[VH]
[0567] [VH]-linker-[VH]-linker-[VL]-linker-[VL]
[0568] [VL]-linker-[VL]-linker-[VH]-linker-[VH]
[0569] [VL]-linker-[VH]-linker-[VL]-linker-[VH]

### Fab, F(ab′)2, and Fab′

[0570] “Fab” consists of a single light chain, and a CH1 region and variable region from a single heavy chain. The heavy chain of a wild-type Fab molecule cannot form disulfide bonds with another heavy chain molecule. Herein, in addition to wild-type Fab molecules, Fab variants in which amino acid residue(s) in a wild-type Fab molecule is altered by substitution, addition, or deletion are also included. In a specific embodiment, mutated amino acid residue(s) comprised in Fab variants (e.g., cysteine residue(s) or lysine residue(s) after substitution, addition, or insertion) can form disulfide bond(s) with another heavy chain molecule or a portion thereof (e.g., Fab molecule).

[0571] scFab is an antigen-binding domain in which a single light chain, and a CH1 region and variable region from a single heavy chain which form Fab are linked together by a peptide linker. The light chain, and the CH1 region and variable region from the heavy chain can be retained in close proximity by the peptide linker.

[0572] “F(ab′)2” or “Fab” is produced by treating an immunoglobulin (monoclonal antibody) with a protease such as pepsin and papain, and refers to an antibody fragment generated by digesting an immunoglobulin (monoclonal antibody) at near the disulfide bonds present between the hinge regions in each of the two H chains. For example, papain cleaves IgG upstream of the disulfide bonds present between the hinge regions in each of the two H chains to generate two homologous antibody fragments, in which an L chain comprising VL (L-chain variable region) and CL (L-chain constant region) is linked to an H-chain fragment comprising VH (H-chain variable region) and CH gamma 1 (gamma 1 region in an H-chain constant region) via a disulfide bond at their C-terminal regions. Each of these two homologous antibody fragments is called Fab′.

[0573] “F(ab′)2” consists of two light chains and two heavy chains comprising the constant region of a CH1 domain and a portion of CH2 domains so that disulfide bonds are formed between the two heavy chains. The F(ab′)2 disclosed herein can be preferably produced as follows. A whole monoclonal antibody or such comprising a desired antigen-binding domain is partially digested with a protease such as pepsin; and Fc fragments are removed by adsorption onto a Protein A column. The protease is not particularly limited, as long as it can cleave the whole antibody in a selective manner to produce F(ab′)2 under an appropriate setup enzyme reaction condition such as pH. Such proteases include, for example, pepsin and ficin.

### Single Domain Antibodies

[0574] Herein, those referred to by the term “single domain antibodies” are not particularly limited in their structure, as long as the domain can exert antigen-binding activity by itself. Ordinary antibodies exemplified by IgG antibodies exert antigen-binding activity in a state where a variable region is formed by the pairing of VH and VL. In contrast, a single domain antibody is known to be able to exert antigen-binding activity by its own domain structure alone without pairing with another domain. Single domain antibodies usually have a relatively low molecular weight and exist in the form of a monomer.

[0575] Examples of a single domain antibody include, but are not limited to, antigen binding molecules which naturally lack light chains, such as VHH of Camelidae animals and V_{NAR} of sharks, and antibody fragments comprising the whole or a portion of an antibody VH domain or the whole or a portion of an antibody VL domain. Examples of a single domain antibody which is an antibody fragment comprising the whole or a portion of an antibody VH/VL domain include, but are not limited to, artificially prepared single domain antibodies originating from a human antibody VH or a human antibody VL as described, e.g., in U.S. Pat. No. 6,248,516 B1. In some embodiments of the present invention, one single domain antibody has three CDRs (CDR1, CDR2, and CDR3).

[0576] Single domain antibodies can be obtained from animals capable of producing single domain antibodies or by immunizing animals capable of producing single domain antibodies. Examples of animals capable of producing single domain antibodies include, but are not limited to, camelids and transgenic animals into which gene(s) for the capability of producing a single domain antibody has been introduced. Camelids include camel, llama, alpaca, dromedary, guanaco, and such. Examples of a transgenic animal into which gene(s) for the capability of producing a single domain antibody has been introduced include, but are not limited to, the transgenic animals described in International Publication No. WO2015/143414 or US Patent Publication No. US2011/0123527 A1. Humanized single chain antibodies can also be obtained, by replacing framework sequences of a single domain antibody obtained from an animal with human germline sequences or sequences similar thereto. A humanized single domain antibody (e.g., humanized VHH) is one embodiment of the single domain antibody of the present invention.

[0577] Alternatively, single domain antibodies can be obtained from polypeptide libraries containing single domain antibodies by ELISA, panning, and such. Examples of polypeptide libraries containing single domain antibodies include, but are not limited to, naive antibody libraries obtained from various animals or humans (e.g., Methods in Molecular Biology 2012 911 (65-78) and Biochimica et Biophysica Acta—Proteins and Proteomics 2006 1764:8 (1307-1319)), antibody libraries obtained by immunizing various animals (e.g., Journal of Applied Microbiology 2014 117:2 (528-536)), and synthetic antibody libraries prepared from antibody genes of various animals or humans (e.g., Journal of Biomolecular Screening 2016 21:1 (35-43), Journal of Biological Chemistry 2016 291:24 (12641-12657), and AIDS 2016 30:11 (1691-1701)).

[0578] “Binding activity” refers to the strength of the sum total of noncovalent interactions between one or more binding sites of a molecule (e.g., an antibody) and its binding partner (e.g., an antigen). Herein, binding activity is not strictly limited to a 1:1 interaction between members of a binding pair (e.g., antibody and antigen). For example, when the members of a binding pair reflect a monovalent 1:1 interaction, the binding activity refers to the intrinsic binding affinity (affinity). When a member of a binding pair is capable of both monovalent binding and multivalent binding, the binding activity is the sum of each binding strength. The binding activity of a molecule X for its partner Y can generally be represented by the dissociation constant (KD) or “amount of bound analyte per unit amount of ligand”. Binding activity can be measured by common methods known in the art, including those described herein.

[0579] An “agonist” antigen-binding molecule or “agonist” antibody, as used herein, is an antigen-binding molecule or antibody which significantly potentiates a biological activity of the antigen it binds.

[0580] A “blocking” antigen-binding molecule or “blocking” antibody, or an “antagonist” antigen-binding molecule or “antagonist” antibody, as used herein, is an antigen-binding molecule or antibody which significantly inhibits (either partially or completely) a biological activity of the antigen it binds.

[0581] The phrase “substantially reduced” or “substantially different,” as used herein, refers to a sufficiently high degree of difference between two numeric values (generally one associated with a molecule and the other associated with a reference/comparator molecule) such that one of skill in the art would consider the difference between the two values to be of statistical significance within the context of the biological characteristic measured by said values (e.g., KD values).

[0582] The term “substantially similar” or “substantially the same,” as used herein, refers to a sufficiently high degree of similarity between two numeric values (for example, one associated with an antibody of the invention and the other associated with a reference/comparator antibody), such that one of skill in the art would consider the difference between the two values to be of little or no biological and/or statistical significance within the context of the biological characteristic measured by said values (e.g., KD values).

[0583] The terms “pharmaceutical formulation” and “pharmaceutical composition” refer to a preparation which is in such form as to permit the biological activity of an active ingredient contained therein to be effective, and which contains no additional components which are unacceptably toxic to a subject to which the formulation would be administered.

[0584] A “pharmaceutically acceptable carrier” refers to an ingredient in a pharmaceutical formulation, other than an active ingredient, which is nontoxic to a subject. A pharmaceutically acceptable carrier includes, but is not limited to, a buffer, excipient, stabilizer, or preservative.

[0585] An “individual” or “subject” is a mammal. Mammals include, but are not limited to, domesticated animals (e.g., cows, sheep, cats, dogs, and horses), primates (e.g., humans and non-human primates such as monkeys), rabbits, and rodents (e.g., mice and rats). In certain embodiments, the individual or subject is a human.

### I. Antigen-Binding Molecule

[0586] I In an aspect, the present disclosure is partly based on the discovery that various activities of an antigen-binding molecule that contains a first antigen-binding domain and a second antigen-binding domain in which the antigen-binding domains are linked with each other via one or more bonds, are enhanced or diminished compared to a control antigen-binding molecule containing antigen-binding domains without the linkage or linked via less bonds. In certain embodiments, an antigen-binding molecule that has activity of holding two or more antigen molecules at spatially close positions is provided. The antigen-binding molecule of the present disclosure is useful, for example, in that it can regulate the activation of two antigen molecules which are activated by association with each other. In certain other embodiments, an antigen-binding molecule that has acquired resistance to protease digestion by the linkage between the antigen-binding domains is provided.

### A. Exemplary Antigen-Binding Molecules

### <Structures of Antigen-Binding Molecules>

[0587] In an aspect, the present disclosure provides an antigen-binding molecule comprising a first antigen-binding domain and a second antigen-binding domain, and the antigen-binding domains are linked with each other via one or more bonds.

[0588] In an embodiment of the above aspects, at least one of the one or more bonds linking the two antigen-binding domains is a covalent bond. In certain embodiments, the covalent bond is formed by direct crosslinking of an amino acid residue in the first antigen-binding domain and an amino acid residue in the second antigen-binding domain. The crosslinked amino acid residues are, for example, cysteine, and the formed covalent bond is, for example, a disulfide bond.

[0589] In certain other embodiments, the covalent bond is formed by crosslinking of an amino acid residue in the first antigen-binding domain and an amino acid residue in the second antigen-binding domain via a crosslinking agent. The crosslinking agent is, for example, an amine-reactive crosslinking agent, and the crosslinked amino acid residues are, for example, lysine.

[0590] In an embodiment of the above aspects, at least one of the one or more bonds linking the antigen-binding domains is a noncovalent bond. In certain embodiments, the noncovalent bond is an ionic bond, hydrogen bond, or hydrophobic bond. The ionic bond is formed, for example, between an acidic amino acid and a basic amino acid. The acidic amino acid is, for example, aspartic acid (Asp) or glutamic acid (Glu). The basic amino acid is, for example, histidine (His), lysine (Lys), or arginine (Arg).

[0591] Amino acid residues from which the bonds between the antigen-binding domains (the bonds which link two antigen-binding domains) originate are respectively present in the first and second antigen-binding domains, and the bonds between the antigen-binding domains are formed by linking these amino acid residues. In an embodiment of the above aspects, at least one of the amino acid residues from which the bond between the antigen-binding domains originates is an artificially introduced mutated amino acid residue and, for example, it is an artificially introduced cysteine residue. Such a mutated amino acid residue can be introduced into a wild-type antigen-binding domain by, for example, a method of amino acid substitution. The present specification discloses the sites of amino acid residues from which the bond between the antigen-binding domains can originate for each of the CH1, CL, and hinge regions as constant regions and the VH, VL, and VHH regions as variable regions when the antigen-binding domains comprise, for example, an antibody fragment, and for example, cysteine residues can be introduced into such sites.

[0592] In an embodiment of the above aspects, at least one of the first and second antigen-binding domains has, by itself, activity of binding to an antigen (i.e., a single antigen-binding domain independently has antigen-binding activity). In certain embodiments, each of the first and second antigen-binding domains has, by itself, activity of binding to an antigen.

[0593] In an embodiment of the above aspects, the first and second antigen-binding domains are both antigen-binding domains of the same type. As stated below, examples of proteins that constitute the antigen-binding domains include polypeptides derived from an antibody or a non-antibody protein, and fragments thereof (for example, a Fab, Fab′, scFab, Fv, scFv, and single domain antibody). From the viewpoint of such molecular forms, when the structures of the proteins constituting the first and second antigen-binding domains are identical, the antigen-binding domains are determined to be of the same type.

[0594] In an embodiment of the above aspects, the at least one bond which links the first antigen-binding domain and the second antigen-binding domain may be formed by linking amino acid residues present at the same position in the first antigen-binding domain and in the second antigen-binding domain with each other, or it may be formed by linking amino acid residues present at a respectively different position with each other.

[0595] Positions of amino acid residues in the antigen-binding domain can be shown according to the Kabat numbering or EU numbering system (also called the EU index) described in Kabat et al., Sequences of Proteins of Immunological Interest, 5th Ed. Public Health Service, National Institutes of Health, Bethesda, M D, 1991. For example, if the amino acid residues from which the bonds between the first and second antigen-binding domains originate are present at an identical position corresponding in the antigen-binding domains, the position of these amino acid residues can be indicated as the same number according to the Kabat numbering or EU numbering system. Alternatively, if the amino acid residues from which the bonds between the first and second antigen-binding domains originate are present at different positions which are not corresponding in the antigen-binding domains, the positions of these amino acid residues can be indicated as different numbers according to the Kabat numbering or EU numbering system.

[0596] In an embodiment of the above aspects, at least one of the first and second antigen-binding domains comprises an antibody fragment which binds to a specific antigen. In certain embodiments, the antibody fragment is a Fab, Fab′, scFab, Fv, scFv, or single domain antibody. In certain embodiments, at least one of the amino acid residues from which the bonds between the antigen-binding domains originate is present in an antibody fragment.

[0597] In an embodiment of the above aspects, at least one of amino acid residues from which the bonds between the antigen-binding domains originate is present within a constant region. In certain embodiments, the amino acid residue is present within a CH1 region, and for example, it is present at any of positions 119 to 123, 131 to 140, 148 to 150, 155 to 167, 174 to 178, 188 to 197, 201 to 214, and 218 to 219 according to EU numbering in the CH1 region. In certain embodiments, the amino acid residue is present at a position selected from the group consisting of positions 119, 122, 123, 131, 132, 133, 134, 135, 136, 137, 138, 139, 140, 148, 150, 155, 156, 157, 159, 160, 161, 162, 163, 164, 165, 167, 174, 176, 177, 178, 188, 189, 190, 191, 192, 193, 194, 195, 196, 197, 201, 203, 205, 206, 207, 208, 211, 212, 213, 214, 218, and 219 according to EU numbering in the CH1 region. In certain embodiments, the amino acid residue is present at position 134, 135, 136, 137, 191, 192, 193, 194, 195, or 196 according to EU numbering in the CH1 region. In certain embodiments, the amino acid residue is present at position 135, 136, or 191 according to EU numbering in the CH1 region.

[0598] In an embodiment of the above aspects, the constant region is derived from human. In certain embodiments, the subclass of the heavy chain constant region is any of IgG1, IgG2, IgG3, IgG4, IgA1, IgA2, IgM, IgD, and IgE. In certain embodiments, the subclass of the CH1 region is any of gamma 1, gamma 2, gamma 3, gamma 4, alpha 1, alpha 2, mu, delta, and epsilon.

[0599] In an embodiment of the above aspects, the at least one bond which links the first antigen-binding domain and the second antigen-binding domain is formed by linking an amino acid residue in the CH1 region of the first antigen-binding domain and an amino acid residue in the CH1 region of the second antigen-binding domain. In certain embodiments, the amino acid residues in the first antigen-binding domain and the second antigen-binding domain are each independently selected from the group consisting of positions 119, 120, 121, 122, and 123 according to EU numbering. In certain embodiments, the amino acid residues in the first antigen-binding domain and the second antigen-binding domain are each independently selected from the group consisting of positions 131, 132, 133, 134, 135, 136, 137, 138, 139, and 140 according to EU numbering. In certain embodiments, the amino acid residues in the first antigen-binding domain and the second antigen-binding domain are each independently selected from the group consisting of positions 148, 149, and 150 according to EU numbering. In certain embodiments, the amino acid residues in the first antigen-binding domain and the second antigen-binding domain are each independently selected from the group consisting of positions 155, 156, 157, 158, 159, 160, 161, 162, 163, 164, 165, 166, and 167 according to EU numbering. In certain embodiments, the amino acid residues in the first antigen-binding domain and the second antigen-binding domain are each independently selected from the group consisting of positions 174, 175, 176, 177, and 178 according to EU numbering. In certain embodiments, the amino acid residues in the first antigen-binding domain and the second antigen-binding domain are each independently selected from the group consisting of positions 188, 189, 190, 191, 192, 193, 194, 195, 196, and 197 according to EU numbering. In certain embodiments, the amino acid residues in the first antigen-binding domain and the second antigen-binding domain are each independently selected from the group consisting of positions 201, 202, 203, 204, 205, 206, 207, 208, 209, 210, 211, 212, 213, and 214 according to EU numbering. In certain embodiments, the amino acid residues in the first antigen-binding domain and the second antigen-binding domain are each independently selected from the group consisting of positions 218 and 219 according to EU numbering.

[0600] In an embodiment of the above aspects, the difference in the positions of the amino acid residues from which the bonds originate in each of the first antigen-binding domain and the second antigen-binding domain is three amino acids or less. This means that when the position of the amino acid residue from which a bond originates in the CH1 region of the first antigen-binding domain and the position of the amino acid residue from which the bond originates in the CH1 region of the second antigen-binding domain are respectively compared according to EU numbering, the difference (i.e., distance) is three amino acids or less. In certain embodiments, the at least one bond which links the first antigen-binding domain and the second antigen-binding domain is formed by linking the amino acid residue at position 135 according to EU numbering in the CH1 region of the first antigen-binding domain and an amino acid residue at any of positions 132 to 138 according to EU numbering in the CH1 region of the second antigen-binding domain. In certain embodiments, the at least one bond which links the first antigen-binding domain and the second antigen-binding domain is formed by linking the amino acid residue at position 136 according to EU numbering in the CH1 region of the first antigen-binding domain and an amino acid residue at any of positions 133 to 139 according to EU numbering in the CH1 region of the second antigen-binding domain.

[0601] In certain embodiments, the at least one bond which links the first antigen-binding domain and the second antigen-binding domain is formed by linking the amino acid residue at position 191 according to EU numbering in the CH1 region of the first antigen-binding domain and an amino acid residue at any of positions 188 to 194 according to EU numbering in the CH1 region of the second antigen-binding domain. In an exemplary embodiment, the at least one bond which links the first antigen-binding domain and the second antigen-binding domain is formed by linking the amino acid residues at position 135 according to EU numbering in the CH1 regions of the two antigen-binding domains with each other. In an exemplary embodiment, the at least one bond which links the first antigen-binding domain and the second antigen-binding domain is formed by linking the amino acid residues at position 136 according to EU numbering in the CH1 regions of the two antigen-binding domains with each other. In an exemplary embodiment, the at least one bond which links the first antigen-binding domain and the second antigen-binding domain is formed by linking the amino acid residues at position 191 according to EU numbering in the CH1 regions of the two antigen-binding domains with each other.

[0602] In an embodiment of the above aspects, at least one of amino acid residues from which the bonds between the antigen-binding domains originate is present within a CL region, and for example, it is present at any of positions 108 to 112, 121 to 128, 151 to 156, 184 to 190, 195 to 196, 200 to 203, and 208 to 213 according to Kabat numbering in the CL region. In certain embodiments, the amino acid residue is present at a position selected from the group consisting of positions 108, 109, 112, 121, 123, 126, 128, 151, 152, 153, 156, 184, 186, 188, 189, 190, 195, 196, 200, 201, 202, 203, 208, 210, 211, 212, and 213 according to Kabat numbering in the CL region. In certain embodiments, the amino acid residue is present at position 126 according to Kabat numbering in the CL region.

[0603] In an embodiment of the above aspects, the constant region is derived from human. In certain embodiments, the subclass of the CL region is kappa or lambda.

[0604] In an embodiment of the above aspects, the at least one bond which links the first antigen-binding domain and the second antigen-binding domain is formed by linking an amino acid residue in the CL region of the first antigen-binding domain and an amino acid residue in the CL region of the second antigen-binding domain. In certain embodiments, the amino acid residues in the first antigen-binding domain and the second antigen-binding domain are each independently selected from the group consisting of positions 108, 109, 110, 111, and 112 according to Kabat numbering. In certain embodiments, the amino acid residues in the first antigen-binding domain and the second antigen-binding domain are each independently selected from the group consisting of positions 121, 122, 123, 124, 125, 126, 127, and 128 according to Kabat numbering. In certain embodiments, the amino acid residues in the first antigen-binding domain and the second antigen-binding domain are each independently selected from the group consisting of positions 151, 152, 153, 154, 155, and 156 according to Kabat numbering. In certain embodiments, the amino acid residues in the first antigen-binding domain and the second antigen-binding domain are each independently selected from the group consisting of positions 184, 185, 186, 187, 188, 189, and 190 according to Kabat numbering. In certain embodiments, the amino acid residues in the first antigen-binding domain and the second antigen-binding domain are each independently selected from the group consisting of positions 195 and 196 according to Kabat numbering. In certain embodiments, the amino acid residues in the first antigen-binding domain and the second antigen-binding domain are each independently selected from the group consisting of positions 200, 201, 202, and 203 according to Kabat numbering. In certain embodiments, the amino acid residues in the first antigen-binding domain and the second antigen-binding domain are each independently selected from the group consisting of positions 208, 209, 210, 211, 212, and 213 according to Kabat numbering.

[0605] In an embodiment of the above aspects, the difference in (i.e., distance between) the positions of the amino acid residues from which the bonds originate in each of the first antigen-binding domain and the second antigen-binding domain is three amino acids or less. This means that when the position of the amino acid residue from which a bond originates in the CL region of the first antigen-binding domain and the position of the amino acid residue from which the bond originates in the CL region of the second antigen-binding domain are respectively compared according to EU numbering, the difference (i.e., distance) is three amino acids or less. In an exemplary embodiment, the at least one bond which links the first antigen-binding domain and the second antigen-binding domain is formed by linking the amino acid residues at position 126 according to Kabat numbering in the CL regions of the two antigen-binding domains with each other.

[0606] In an embodiment of the above aspects, the at least one bond which links the first antigen-binding domain and the second antigen-binding domain is formed by linking an amino acid residue in the CH1 region of the first antigen-binding domain and an amino acid residue in the CL region of the second antigen-binding domain. In certain embodiments, the amino acid residues in the CH1 region of the first antigen-binding domain are selected from the group consisting of positions 188, 189, 190, 191, 192, 193, 194, 195, 196, and 197 according to EU numbering, and the amino acid residues in the CL region of the second antigen-binding domain are selected from the group consisting of positions 121, 122, 123, 124, 125, 126, 127, and 128 according to Kabat numbering. In an exemplary embodiment, the at least one bond which links the first antigen-binding domain and the second antigen-binding domain is formed by linking the amino acid residue at position 191 according to EU numbering in the CH1 region of the first antigen-binding domain and the amino acid residue at position 126 according to Kabat numbering in the CL region of the second antigen-binding domain.

[0607] In an embodiment of the above aspects, at least one of amino acid residues from which the bonds between the antigen-binding domains originate is present within a variable region. In certain embodiments, the amino acid residue is present within a VH region, and for example, it is present at a position selected from the group consisting of positions 6, 8, 16, 20, 25, 26, 28, 74, and 82b according to Kabat numbering in the VH region. In certain embodiments, the amino acid residue is present within a VL region, and for example, it is present at a position selected from the group consisting of positions 21, 27, 58, 77, 100, 105, and 107 according to Kabat numbering in the VL region (subclass kappa) and positions 6, 19, 33, and 34 according to Kabat numbering in the VL region (subclass lambda). In certain embodiments, the amino acid residue is present within a VHH region, and for example, it is present at a position selected from the group consisting of positions 4, 6, 7, 8, 9, 10, 11, 12, 14, 15, 17, 20, 24, 27, 29, 38, 39, 40, 41, 43, 44, 45, 46, 47, 48, 49, 67, 69, 71, 78, 80, 82, 82c, 85, 88, 91, 93, 94, and 107 according to Kabat numbering in the VHH region.

[0608] In an embodiment of the above aspects, at least one of the first and second antigen-binding domains comprises a non-antibody protein binding to a particular antigen, or a fragment thereof. In certain embodiments, the non-antibody protein is either of a pair of a ligand and a receptor which specifically bind to each other. Such receptors include, for example, receptors belonging to cytokine receptor superfamilies, G protein-coupled receptors, ion channel receptors, tyrosine kinase receptors, immune checkpoint receptors, antigen receptors, CD antigens, costimulatory molecules, and cell adhesion molecules.

[0609] In an embodiment of the above aspects, the first and/or second antigen-binding domains comprise a hinge region. In certain embodiments, at least one of the cysteine residues present within a wild-type hinge region is substituted to another amino acid residue. Such cysteine residues are present, for example, at positions 226 and/or 229 according to EU numbering in the wild-type hinge region. In certain embodiments, at least one of amino acid residues from which the bonds between the antigen-binding domains originate is present within a hinge region and, for example, it is present at a position selected from the group consisting of positions 216, 218, and 219 according to EU numbering in the hinge region.

[0610] In an embodiment of the above aspects, the first antigen-binding domain and the second antigen-binding domain are linked with each other via two or more bonds.

[0611] In certain embodiments, at least one of amino acid residues from which the bonds between the antigen-binding domains originate is an amino acid residue present in a wild-type sequence and, for example, it is a cysteine residue in a wild-type hinge region. In certain embodiments, the at least one bond which links the first antigen-binding domain and the second antigen-binding domain is a disulfide bond formed by crosslinking of cysteine residues present within wild-type hinge regions with each other. Such cysteine residues are present, for example, at positions 226 and/or 229 according to EU numbering of a wild-type hinge region.

[0612] In certain embodiments, at least one of amino acid residues from which the bonds between the antigen-binding domains originate is present within an antibody fragment, and at least one is present within a hinge region. In an exemplary embodiment, the antigen-binding molecule of the present disclosure is F(ab′)2 in which both the first and second antigen-binding domains comprise a Fab and a hinge region.

[0613] In an embodiment of the above aspects, the antigen-binding molecule of the present disclosure further comprises an Fc region, and for example, it is a full-length antibody. In certain embodiments, one or more amino acid mutations promoting multimerization of Fc regions are introduced into the Fc region of the antigen-binding molecule of the present disclosure. Such amino acid mutations include, for example, the amino acid mutations at at least one position selected from the group consisting of positions 247, 248, 253, 254, 310, 311, 338, 345, 356, 359, 382, 385, 386, 430, 433, 434, 436, 437, 438, 439, 440, and 447 according to EU numbering (see, e.g., WO 2016/164480). In certain embodiments, the multimerization is hexamerization.

### <Antigens Bound by Antigen-Binding Molecules>

[0614] In an embodiment of the above aspects, both the first and second antigen-binding domains bind to the same antigen. In certain embodiments, both the first and second antigen-binding domains bind to the same epitope on the same antigen. In certain other embodiments, each of the first and second antigen-binding domains binds to a different epitope on the same antigen. In certain embodiments, the antigen-binding molecule of the present disclosure is a biparatopic antigen-binding molecule (for example, a biparatopic antibody) that targets one specific antigen. In another embodiment of the above aspects, each of the first and second antigen-binding domains binds to a different antigen.

[0615] In another embodiment of the above aspects, the antigen-binding molecule of the present disclosure is a clamping antigen-binding molecule (for example, a clamping antibody). A clamping antigen-binding molecule in the present specification means an antigen-binding molecule which specifically binds to an antigen/antigen-binding molecule complex formed between a given antigen A and an antigen-binding molecule which binds to antigen A, and which thereby increases the binding activity toward antigen A of the antigen-binding molecule that binds to antigen A (or alternatively, stabilizes the antigen/antigen-binding molecule complex formed by antigen A and the antigen-binding molecule that binds to antigen A). For example, a CD3 clamping antibody specifically binds to the antigen-antibody complex formed between CD3 and an antibody with reduced binding ability toward CD3 (binding-attenuated CD3 antibody) and can thereby increase the binding activity of the binding-attenuated CD3 antibody toward CD3 (or alternatively, stabilize the antigen-antibody complex formed by CD3 and the binding-attenuated CD3 antibody). In certain embodiments, the first and/or second antigen-binding domains in the antigen-binding molecule of the present disclosure can be antigen-binding domains (clamping antigen-binding domains) from clamping antigen-binding molecules.

[0616] In an embodiment of the above aspects, both the first and second antigen-binding domains have the same amino acid sequence. In another embodiment, each of the first and second antigen-binding domains has a different amino acid sequence.

[0617] In an embodiment of the above aspects, at least one of two antigens to which the first and second antigen-binding domains bind is a soluble protein or a membrane protein.

### <Functions of Antigen-Binding Molecules>

[0618] In an embodiment of the above aspects, the antigen-binding molecule of the present disclosure has activity of holding two antigen molecules at spatially close positions. In certain embodiments, the antigen-binding molecule of the present disclosure is capable of holding two antigen molecules at closer positions than a control antigen-binding molecule, and the control antigen-binding molecule differs from the antigen-binding molecule of the present disclosure only in that the control antigen-binding molecule has one less bond between the two antigen-binding domains. In a further embodiment, the one less bond can be selected from bonds in which the amino acid residues from which the bonds between the antigen-binding domains originate are derived from mutated amino acid residues which are not present in a wild-type Fab or hinge region (for example, cysteine residues which are not present in the wild-type Fab or hinge region).

[0619] In another embodiment of the above aspects, the antigen-binding molecule of the present disclosure has activity of regulating interaction between two antigen molecules. Without being bound by a particular theory, the activity of regulating interaction is thought to be resulted from holding two antigen molecules at spatially closer positions by the antigen-binding molecule of the present disclosure. In certain embodiments, the antigen-binding molecule of the present disclosure is capable of enhancing or diminishing interaction between two antigen molecules as compared to a control antigen-binding molecule, and the control antigen-binding molecule differs from the antigen-binding molecule of the present disclosure only in that the control antigen-binding molecule has one less bond between the two antigen-binding domains. In a further embodiment, the one less bond can be selected from bonds in which the amino acid residues from which the bonds between the antigen-binding domains originate are derived from mutated amino acid residues which are not present in a wild-type Fab or hinge region (for example, cysteine residues which are not present in the wild-type Fab or hinge region).

[0620] In certain embodiments, the two antigen molecules bound by the antigen-binding molecule of the present disclosure are a ligand and a receptor thereof, respectively, and the antigen-binding molecule of the present disclosure has activity of promoting activation of the receptor by the ligand. In certain other embodiment, the two antigen molecules bound by the antigen-binding molecule of the present disclosure are an enzyme and a substrate thereof, respectively, and the antigen-binding molecule of the present disclosure has activity of promoting catalytic reaction of the enzyme with the substrate.

[0621] Further, in certain other embodiments, both of the two antigen molecules bound by the antigen-binding molecule of the present disclosure are antigens (for example, proteins) present on cellular surfaces, and the antigen-binding molecule of the present disclosure has activity of promoting interaction between a cell expressing the first antigen and a cell expressing the second antigen. For example, the cell expressing the first antigen and the cell expressing the second antigen are, respectively, a cell with cytotoxic activity and a target cell thereof, and the antigen-binding molecule of the present disclosure promotes damage of the target cell by the cell with cytotoxic activity. The cell with cytotoxic activity is, for example, a T cell, NK cell, monocyte, or macrophage.

[0622] In an embodiment of the above aspects, the antigen-binding molecule of the present disclosure has activity of regulating activation of two antigen molecules which are activated by association with each other. Without being bound by a particular theory, the activity of regulating activation is thought to be resulted from holding two antigen molecules at spatially closer positions by the antigen-binding molecule of the present disclosure. In certain embodiments, the antigen-binding molecule of the present disclosure can enhance or diminish activation of two antigen molecules as compared to a control antigen-binding molecule, and the control antigen-binding molecule differs from the antigen-binding molecule of the present disclosure only in that the control antigen-binding molecule has one less bond between the two antigen-binding domains. In a further embodiment, the one less bond can be selected from bonds in which the amino acid residues from which the bonds between the antigen-binding domains originate are derived from mutated amino acid residues which are not present in a wild-type Fab or hinge region (for example, cysteine residues which are not present in the wild-type Fab or hinge region). For example, such antigen molecules are selected from the group consisting of receptors belonging to cytokine receptor superfamilies, G protein-coupled receptors, ion channel receptors, tyrosine kinase receptors, immune checkpoint receptors, antigen receptors, CD antigens, costimulatory molecules, and cell adhesion molecules.

[0623] In an embodiment of the above aspects, in the antigen-binding molecule of the present disclosure, two antigen-binding domains are present at spatially close positions and/or the mobility of the two antigen-binding domains is reduced. In certain embodiments, as compared with a control antigen-binding molecule, the antigen-binding molecule of the present disclosure has two antigen-binding domains that are present at closer positions and/or the mobility of the two antigen-binding domains is more reduced, and the control antigen-binding molecule differs from the antigen-binding molecule of the present disclosure only in that it has one less bond between the two antigen-binding domains. In a further embodiment, the one less bond can be selected from bonds in which the amino acid residues from which the bonds between the antigen-binding domains originate are derived from mutated amino acid residues which are not present in a wild-type Fab or hinge region (for example, cysteine residues which are not present in the wild-type Fab or hinge region).

[0624] In an embodiment of the above aspects, the antigen-binding molecule of the present disclosure has resistance to protease cleavage. In certain embodiments, the antigen-binding molecule of the present disclosure has increased resistance to protease cleavage as compared to a control antigen-binding molecule, and the control antigen-binding molecule differs from the antigen-binding molecule of the present disclosure only in that the control antigen-binding molecule has one less bond between the two antigen-binding domains. In a further embodiment, the one less bond can be selected from bonds in which the amino acid residues from which the bonds between the antigen-binding domains originate are derived from mutated amino acid residues which are not present in a wild-type Fab or hinge region (for example, cysteine residues which are not present in the wild-type Fab or hinge region). In certain embodiments, in the antigen-binding molecule of the present disclosure, the proportion of the full-length molecule (for example, full-length IgG molecule) remaining after protease treatment is increased as compared to the control antigen-binding molecule. In certain embodiments, in the antigen-binding molecule of the present disclosure, the proportion of a particular fragment (for example, Fab monomer) produced after protease treatment is reduced as compared to the control antigen-binding molecule.

[0625] In an embodiment of the above aspects, when the antigen-binding molecule of the present disclosure is treated with a protease, a dimer of the antigen-binding domains or fragments thereof (for example, crosslinked Fab dimer) is excised. In certain embodiments, when the control antigen-binding molecule, which differs from the antigen-binding molecule of the present disclosure only in that it has one less bond between the two antigen-binding domains, is treated with the protease, monomers of the antigen-binding domains or fragments thereof are excised. In a further embodiment, the one less bond can be selected from bonds in which the amino acid residues from which the bonds between the antigen-binding domains originate are derived from mutated amino acid residues which are not present in a wild-type Fab or hinge region (for example, cysteine residues which are not present in the wild-type Fab or hinge region). In these embodiments, the protease can cleave the hinge region of the antigen-binding molecule.

[0626] In a further embodiment, the control antigen-binding molecule differs from the antigen-binding molecule of the present disclosure only in that it has one less bond between the two antigen-binding domains, and the one less bond is a bond which is formed originating from mutated amino acid residues. The mutated amino acid residues are, for example, artificially introduced cysteine residues.

### <Pharmaceutical Compositions >

[0627] In an aspect, the present disclosure provides a pharmaceutical composition comprising the antigen-binding molecule of the present disclosure and a pharmaceutically acceptable carrier.

### <Use of Antigen-Binding Molecules>

[0628] In an aspect, the present disclosure provides a method for holding two antigen molecules at spatially close positions, comprising:
[0629] (a) providing an antigen-binding molecule comprising two antigen-binding domains,
[0630] (b) adding to the antigen-binding molecule at least one bond which links the two antigen-binding domains with each other, and
[0631] (c) contacting the antigen-binding molecule produced in (b) with the two antigen molecules. In certain embodiments, the two antigen-binding domains in the antigen-binding molecule recited in (a) above may be linked with each other via one or more bonds, and in this case, some or all of the one or more bonds are bonds in which the amino acid residues from which the bonds between the antigen-binding domains originate are derived from amino acid residues which are present in a wild-type Fab or hinge region (for example, cysteine residues in the hinge region). In a further embodiment, said at least one bond recited in (b) above is a bond in which the amino acid residues from which the bond between the antigen-binding domains originates are derived from mutated amino acid residues which are not present in a wild-type Fab or hinge region (for example, cysteine residues which are not present in the wild-type Fab or hinge region). The present disclosure also provides a method for holding two antigen molecules at spatially close positions which comprises contacting two antigen molecules with the antigen-binding molecule or pharmaceutical composition of the present disclosure. The present disclosure further provides an antigen-binding molecule or pharmaceutical composition of the present disclosure for use in holding two antigen molecules at spatially close positions.

[0632] In another aspect, the present disclosure provides a method for regulating interaction between two antigen molecules, comprising:
[0633] (a) providing an antigen-binding molecule comprising two antigen-binding domains,
[0634] (b) adding to the antigen-binding molecule at least one bond which links the two antigen-binding domains with each other, and
[0635] (c) contacting the antigen-binding molecule produced in (b) with the two antigen molecules. In certain embodiments, the two antigen-binding domains in the antigen-binding molecule recited in (a) above may be linked with each other via one or more bonds, and in this case, some or all of the one or more bonds are bonds in which the amino acid residues from which the bonds between the antigen-binding domains originate are derived from amino acid residues which are present in a wild-type Fab or hinge region (for example, cysteine residues in the hinge region). In a further embodiment, said at least one bond recited in (b) above is a bond in which the amino acid residues from which the bond between the antigen-binding domains originates are derived from mutated amino acid residues which are not present in a wild-type Fab or hinge region (for example, cysteine residues which are not present in the wild-type Fab or hinge region). The present disclosure also provides a method for regulating interaction between two antigen molecules which comprises contacting two antigen molecules with the antigen-binding molecule or pharmaceutical composition of the present disclosure. The present disclosure further provides an antigen-binding molecule or pharmaceutical composition of the present disclosure for use in regulating interaction between two antigen molecules.

[0636] Further, in another aspect, the present disclosure provides a method for regulating activity of two antigen molecules which are activated by association with each other, comprising:
[0637] (a) providing an antigen-binding molecule comprising two antigen-binding domains,
[0638] (b) adding to the antigen-binding molecule at least one bond which links the two antigen-binding domains with each other, and
[0639] (c) contacting the antigen-binding molecule produced in (b) with the two antigen molecules. In certain embodiments, the two antigen-binding domains in the antigen-binding molecule recited in (a) above may be linked with each other via one or more bonds, and in this case, some or all of the one or more bonds are bonds in which the amino acid residues from which the bonds between the antigen-binding domains originate are derived from amino acid residues which are present in a wild-type Fab or hinge region (for example, cysteine residues in the hinge region). In a further embodiment, said at least one bond recited in (b) above is a bond in which the amino acid residues from which the bond between the antigen-binding domains originates are derived from mutated amino acid residues which are not present in a wild-type Fab or hinge region (for example, cysteine residues which are not present in the wild-type Fab or hinge region). The present disclosure also provides a method for regulating activity of two antigen molecules which are activated by association with each other, which comprises contacting two antigen molecules with the antigen-binding molecule or pharmaceutical composition of the present disclosure. The present disclosure further provides an antigen-binding molecule or pharmaceutical composition of the present disclosure for use in regulating activity of two antigen molecules which are activated by association with each other.

[0640] Further, in another aspect, the present disclosure provides a method for placing two antigen-binding domains at spatially close positions and/or reducing the mobility of two antigen-binding domains, comprising:
[0641] (a) providing an antigen-binding molecule comprising two antigen-binding domains, and
[0642] (b) adding to the antigen-binding molecule at least one bond which links the two antigen-binding domains with each other. In certain embodiments, the two antigen-binding domains in the antigen-binding molecule recited in (a) above may be linked with each other via one or more bonds, and in this case, some or all of the one or more bonds are bonds in which the amino acid residues from which the bonds between the antigen-binding domains originate are derived from amino acid residues which are present in a wild-type Fab or hinge region (for example, cysteine residues in the hinge region). In a further embodiment, said at least one bond recited in (b) above is a bond in which the amino acid residues from which the bond between the antigen-binding domains originates are derived from mutated amino acid residues which are not present in a wild-type Fab or hinge region (for example, cysteine residues which are not present in the wild-type Fab or hinge region).

[0643] Furthermore, in another aspect, the present disclosure provides a method for increasing resistance of an antigen-binding molecule to protease cleavage, comprising:
[0644] (a) providing an antigen-binding molecule comprising two antigen-binding domains, and
[0645] (b) adding to the antigen-binding molecule at least one bond which links the two antigen-binding domains with each other. In certain embodiments, the two antigen-binding domains in the antigen-binding molecule recited in (a) above may be linked with each other via one or more bonds, and in this case, some or all of the one or more bonds are bonds in which the amino acid residues from which the bonds between the antigen-binding domains originate are derived from amino acid residues which are present in a wild-type Fab or hinge region (for example, cysteine residues in the hinge region). In a further embodiment, said at least one bond recited in (b) above is a bond in which the amino acid residues from which the bond between the antigen-binding domains originates are derived from mutated amino acid residues which are not present in a wild-type Fab or hinge region (for example, cysteine residues which are not present in the wild-type Fab or hinge region).

[0646] The antigen-binding molecule used in these various methods may have the characteristics of the antigen-binding molecules described herein.

### <Methods for Producing Antigen-Binding Molecules>

[0647] In an aspect, the present disclosure provides a method for producing an antigen-binding molecule which has activity of holding two antigen molecules at spatially close positions, comprising:
[0648] (a) providing a nucleic acid encoding a polypeptide comprising a first antigen-binding domain and a nucleic acid encoding a polypeptide comprising a second antigen-binding domain,
[0649] (b) introducing a mutation into the nucleic acids encoding the two antigen-binding domains such that at least one bond linking the two antigen-binding domains is added,
[0650] (c) introducing the nucleic acids produced in (b) into a host cell,
[0651] (d) culturing the host cell such that the two polypeptides are expressed, and
[0652] (e) obtaining an antigen-binding molecule which is a polypeptide comprising the first and second antigen-binding domains, wherein the two antigen-binding domains are linked with each other via one or more bonds; and preferably further comprising a step of contacting the antibody preparation with a reducing reagent.

[0653] In certain embodiments, said contacting with a reducing agent (“said contacting step”) preferentially enriches or increases the population of an antibody structural isoform having at least one disulfide bond formed between amino acid residues which are not in a hinge region. In certain embodiments, said method produces a homogenous antibody preparation having at least 50%, 60%, 70%, 80%, 90%, preferably at least 95% molar ratio of said antibody having at least one disulfide bond formed between amino acid residues which are not in a hinge region.

[0654] In certain embodiments, the pH of said reducing reagent contacting with the antibody is from about 3 to about 10. In certain embodiments, the pH of said reducing reagent contacting with the antibody is about 6, 7 or 8. In some embodiments, the pH of said reducing reagent contacting with the antibody is about 7 or about 3.

[0655] In certain embodiments, the reducing agent is selected from the group consisting of TCEP, 2-MEA, DTT, Cysteine, GSH and Na₂SO₃. In some preferred embodiments, the reducing agent is TCEP. In certain embodiments, the concentration of the reducing agent is from about 0.01 mM to about 100 mM.

[0656] In some preferred embodiments, the concentration of the reducing agent is about 0.01, 0.05, 0.1, 0.25, 0.5, 1, 2.5, 5, 10, 25, 50, 100 mM, preferably about 0.01 mM to 25 mM. In one preferred embodiment, the reducing agent is 0.01 mM to 25 mM of TCEP.

[0657] In certain embodiments, the contacting step with a reducing agent is performed for at least 30 minutes. In certain embodiments, the contacting step is performed for about 2 to about 48 hours. In some preferred embodiments, the contacting step is performed for about 2 hours or about 16 hours.

[0658] In certain embodiments, the contacting step is performed at a temperature of about 20 degrees C. to 37 degrees C., preferably at 23 degrees C., 25 degrees C. or 37 degrees C., more preferably at 23 degrees C. In certain embodiments, said antibody is partially purified by affinity chromatography (preferably Protein A chromatography) prior to said contacting. In certain embodiments, the concentration of the antibody is from about 1 mg/ml and about 50 mg/ml. In some preferred embodiments, the concentration of the antibody is about 1 mg/ml or about 20 mg/ml.

[0659] In certain embodiments, said contacting step preferentially enriches or increases the population of an antibody structural isoform having at least one disulfide bond formed between amino acid residues which are not in a hinge region. In certain embodiments, said contacting step produces a homogenous antibody preparation having at least 50%, 60%, 70%, 80%, 90%, preferably at least 95% molar ratio of said antibody having at least one disulfide bond formed between amino acid residues which are not in a hinge region.

[0660] In certain embodiments, said contacting step produces an antibody preparation which is more homogeneous than the same antibody preparation that has not been treated by said method.

[0661] In certain embodiments, said contacting step produces an antibody preparation having increase in its biological activity compared to the same antibody that has not been treated by said method.

[0662] In certain embodiments, said contacting step produces an antibody having enhanced activity of holding two antigen molecules at spatially close positions compared to the same antibody that has not been treated by said method.

[0663] In certain embodiments, said contacting step produces an antibody having enhanced stability compared to the same antibody that has not been treated by said method.

[0664] In certain embodiments, said contacting step preferentially enriches antibody having at least one disulfide bond formed outside of hinge regions and said preferentially enriched form has a pharmaceutically desirable property selected from any of (a) to (e) below, as compared to a preparation that has not been treated by said contacting step:
[0665] (a) wherein said at least one disulfide bond restricts the antigen binding orientation of the two antigen-binding domains to cis antigen-binding (i.e. binding to two antigens on the same cell), or restrict binding of the two antigen binding domains to two antigens which are spatially close to each other;
[0666] (b) wherein said at least one disulfide bond holds the first antigen-binding domain and the second antigen-binding domain spatially closer to each other, as compared to a same corresponding antibody which does not have said at least one disulfide bond;
[0667] (c) wherein said at least one disulfide bond reduce the flexibility and/or mobility of first antigen-binding domain and the second antigen-binding domain, as compared to a corresponding same antibody which does not have said at least one disulfide bond;
[0668] (d) wherein said at least one disulfide bond increases resistance of the antibody to protease cleavage, as compared to a corresponding same antibody which does not have said at least one disulfide bond; or
[0669] (e) wherein said at least one disulfide bond enhances or reduces interaction between two antigen molecules bound by the antigen-binding molecule, as compared to a corresponding same antibody which does not have said at least one disulfide bond.

[0670] In certain embodiments, each of the two antigen-binding domains recited in (a) above may comprise one or more amino acid residues from which the bonds for linking the two antigen-binding domains originate, and in this case, some or all of the one or more amino acid residues from which the bond between the antigen-binding domains originates are amino acid residues which are present in a wild-type Fab or hinge region (for example, cysteine residues in the hinge region). In a further embodiment, said at least one bond recited in (b) above is a bond in which the amino acid residues from which the bond between the antigen-binding domains originates are derived from mutated amino acid residues which are not present in a wild-type Fab or hinge region (for example, cysteine residues which are not present in the wild-type Fab or hinge region).

[0671] In another aspect, the present disclosure provides a method for producing an antigen-binding molecule which has activity of regulating interaction between two antigen molecules, comprising:
[0672] (a) providing a nucleic acid encoding a polypeptide comprising a first antigen-binding domain and a nucleic acid encoding a polypeptide comprising a second antigen-binding domain,
[0673] (b) introducing a mutation into the nucleic acids encoding the two antigen-binding domains such that at least one bond linking the two antigen-binding domains is added,
[0674] (c) introducing the nucleic acids produced in (b) into a host cell,
[0675] (d) culturing the host cell such that the two polypeptides are expressed, and
[0676] (e) obtaining an antigen-binding molecule which is a polypeptide comprising the first and second antigen-binding domains, wherein the two antigen-binding domains are linked with each other via one or more bonds.

[0677] In certain embodiments, each of the two antigen-binding domains recited in (a) above may comprise one or more amino acid residues from which the bonds for linking the two antigen-binding domains originate, and in this case, some or all of the one or more amino acid residues from which the bond between the antigen-binding domains originates are amino acid residues which are present in a wild-type Fab or hinge region (for example, cysteine residues in the hinge region). In a further embodiment, said at least one bond recited in (b) above is a bond in which the amino acid residues from which the bond between the antigen-binding domains originates are derived from mutated amino acid residues which are not present in a wild-type Fab or hinge region (for example, cysteine residues which are not present in the wild-type Fab or hinge region).

[0678] Further, in another aspect, the present disclosure provides a method for producing an antigen-binding molecule which has activity of regulating activation of two antigen molecules which are activated by association with each other, comprising:
[0679] (a) providing a nucleic acid encoding a polypeptide comprising a first antigen-binding domain and a nucleic acid encoding a polypeptide comprising a second antigen-binding domain,
[0680] (b) introducing a mutation into the nucleic acids encoding the two antigen-binding domains such that at least one bond linking the two antigen-binding domains is added,
[0681] (c) introducing the nucleic acids produced in (b) into a host cell,
[0682] (d) culturing the host cell such that the two polypeptides are expressed, and
[0683] (e) obtaining an antigen-binding molecule which is a polypeptide comprising the first and second antigen-binding domains, wherein the two antigen-binding domains are linked with each other via one or more bonds.

[0684] In certain embodiments, each of the two antigen-binding domains recited in (a) above may comprise one or more amino acid residues from which the bonds for linking the two antigen-binding domains originate, and in this case, some or all of the one or more amino acid residues from which the bond between the antigen-binding domains originates are amino acid residues which are present in a wild-type Fab or hinge region (for example, cysteine residues in the hinge region). In a further embodiment, said at least one bond recited in (b) above is a bond in which the amino acid residues from which the bond between the antigen-binding domains originates are derived from mutated amino acid residues which are not present in a wild-type Fab or hinge region (for example, cysteine residues which are not present in the wild-type Fab or hinge region).

[0685] Further, in another aspect, the present disclosure provides a method for producing an antigen-binding molecule in which two antigen-binding domains are present at spatially close positions and/or the mobility of two antigen-binding domains is reduced, comprising:
[0686] (a) providing a nucleic acid encoding a polypeptide comprising a first antigen-binding domain and a nucleic acid encoding a polypeptide comprising a second antigen-binding domain,
[0687] (b) introducing a mutation into the nucleic acids encoding the two antigen-binding domains such that at least one bond linking the two antigen-binding domains is added,
[0688] (c) introducing the nucleic acids produced in (b) into a host cell,
[0689] (d) culturing the host cell such that the two polypeptides are expressed, and
[0690] (e) obtaining an antigen-binding molecule which is a polypeptide comprising the first and second antigen-binding domains, wherein the two antigen-binding domains are linked with each other via one or more bonds.

[0691] In certain embodiments, each of the two antigen-binding domains recited in (a) above may comprise one or more amino acid residues from which the bonds for linking the two antigen-binding domains originate, and in this case, some or all of the one or more amino acid residues from which the bond between the antigen-binding domains originates are amino acid residues which are present in a wild-type Fab or hinge region (for example, cysteine residues in the hinge region). In a further embodiment, said at least one bond recited in (b) above is a bond in which the amino acid residues from which the bond between the antigen-binding domains originates are derived from mutated amino acid residues which are not present in a wild-type Fab or hinge region (for example, cysteine residues which are not present in the wild-type Fab or hinge region).

[0692] Furthermore, in another aspect, the present disclosure provides a method for producing an antigen-binding molecule which has increased resistance to protease cleavage, comprising:
[0693] (a) providing a nucleic acid encoding a polypeptide comprising a first antigen-binding domain and a nucleic acid encoding a polypeptide comprising a second antigen-binding domain,
[0694] (b) introducing a mutation into the nucleic acids encoding the two antigen-binding domains such that at least one bond linking the two antigen-binding domains is added,
[0695] (c) introducing the nucleic acids produced in (b) into a host cell,
[0696] (d) culturing the host cell such that the two polypeptides are expressed, and
[0697] (e) obtaining an antigen-binding molecule which is a polypeptide comprising the first and second antigen-binding domains, wherein the two antigen-binding domains are linked with each other via one or more bonds.

[0698] In certain embodiments, each of the two antigen-binding domains recited in (a) above may comprise one or more amino acid residues from which the bonds for linking the two antigen-binding domains originate, and in this case, some or all of the one or more amino acid residues from which the bond between the antigen-binding domains originates are amino acid residues which are present in a wild-type Fab or hinge region (for example, cysteine residues in the hinge region). In a further embodiment, said at least one bond recited in (b) above is a bond in which the amino acid residues from which the bond between the antigen-binding domains originates are derived from mutated amino acid residues which are not present in a wild-type Fab or hinge region (for example, cysteine residues which are not present in the wild-type Fab or hinge region).

[0699] The antigen-binding molecule produced in these various aspects may have the characteristics of the antigen-binding molecules described herein.

### <Methods of Screening for Antigen-Binding Molecules>

[0700] In another aspect, the present disclosure provides a method for identifying a novel pair of protein molecules which are activated by association with each other, comprising:
[0701] (a) providing two arbitrary protein molecules,
[0702] (b) producing, by the production method of the present disclosure, an antigen-binding molecule comprising two antigen-binding domains which respectively bind to the two protein molecules,
[0703] (c) contacting the antigen-binding molecule produced in (b) with the two protein molecules, and
[0704] (d) assessing whether or not the two protein molecules are activated.

[0705] In certain embodiments, at least one of the two protein molecules is selected from the group consisting of receptors belonging to cytokine receptor superfamilies, G protein-coupled receptors, ion channel receptors, tyrosine kinase receptors, immune checkpoint receptors, antigen receptors, CD antigens, costimulatory molecules, and cell adhesion molecules.

### A. Exemplary Antigen-Binding Molecules

### <Structures of Antigen-Binding Molecules>

[0706] In an aspect, the present disclosure provides an antigen-binding molecule comprising a first antigen-binding domain and a second antigen-binding domain, and the antigen-binding domains are linked with each other via two or more bonds. In an embodiment, at least one of the first and second antigen-binding domains has, by itself, activity of binding to an antigen (i.e., a single antigen-binding domain independently has antigen-binding activity). In certain embodiments, each of the first and second antigen-binding domains has, by itself, activity of binding to an antigen.

[0707] In an embodiment of the above aspects, at least one of the first and second antigen-binding domains comprises an antibody fragment which binds to a particular antigen. In certain embodiments, the first and/or second antigen-binding domains comprise a hinge region. Amino acid residues from which the bonds between the antigen-binding domains originate are respectively present in the first and second antigen-binding domains, and the bonds between the antigen-binding domains are formed by linking these amino acid residues. In certain embodiments, at least one of amino acid residues from which the bonds between the antigen-binding domains originate is present within the antibody fragment. In certain embodiments, at least one of amino acid residues from which the bonds between the antigen-binding domains originate is present within a hinge region. In certain embodiments, at least one of amino acid residues from which the bonds between the antigen-binding domains originate is present within the antibody fragment, and at least one of the amino acid residues is present within a hinge region.

[0708] In an embodiment of the above aspects, in at least one of the first and second antigen-binding domains, multiple amino acid residues from which the bonds between the antigen-binding domains originate are present at positions at a distance of seven amino acids or more from each other in the primary structure. This means that, between any two amino acid residues of the above multiple amino acid residues, six or more amino acid residues which are not said amino acid residues are present. In certain embodiments, combinations of multiple amino acid residues from which the bonds between the antigen-binding domains originate include a pair of amino acid residues which are present at positions at a distance of less than seven amino acids in the primary structure. In certain embodiments, if the first and second antigen-binding domains are linked each other via three or more bonds, the bonds between the antigen-binding domains may originate from three or more amino acid residues including a pair of amino acid residues which are present at positions at a distance of seven amino acids or more in the primary structure.

[0709] In certain embodiments, amino acid residues present at the same position in the first antigen-binding domain and in the second antigen-binding domain are linked with each other to form a bond. In certain embodiments, amino acid residues present at a different position in the first antigen-binding domain and in the second antigen-binding domain are linked with each other to form a bond.

[0710] Positions of amino acid residues in the antigen-binding domain can be shown according to the Kabat numbering or EU numbering system (also called the EU index) described in Kabat et al., Sequences of Proteins of Immunological Interest, 5th Ed. Public Health Service, National Institutes of Health, Bethesda, M D, 1991. For example, if the amino acid residues from which the bonds between the first and second antigen-binding domains originate are present at an identical position corresponding in the antigen-binding domains, the position of these amino acid residues can be indicated as the same number according to the Kabat numbering or EU numbering system. Alternatively, if the amino acid residues from which the bonds between the first and second antigen-binding domains originate are present at different positions which are not corresponding in the antigen-binding domains, the positions of these amino acid residues can be indicated as different numbers according to the Kabat numbering or EU numbering system.

[0711] In an embodiment of the above aspects, at least one of the two or more bonds linking the antigen-binding domains is a covalent bond. In certain embodiments, the covalent bond is formed by direct crosslinking of an amino acid residue in the first antigen-binding domain and an amino acid residue in the second antigen-binding domain. The crosslinked amino acid residues are, for example, cysteine, and the formed covalent bond is, for example, a disulfide bond. At least one of the crosslinked cysteine residues may be present within a hinge region.

[0712] In certain other embodiments, the covalent bond is formed by crosslinking of an amino acid residue in the first antigen-binding domain and an amino acid residue in the second antigen-binding domain via a crosslinking agent. The crosslinking agent is, for example, an amine-reactive crosslinking agent, and the crosslinked amino acid residues are, for example, lysine.

[0713] In an embodiment of the above aspects, at least one of the two or more bonds linking the antigen-binding domains is a noncovalent bond. In certain embodiments, the noncovalent bond is an ionic bond, hydrogen bond, or hydrophobic bond.

[0714] In an embodiment of the above aspects, the antibody fragment is a Fab, Fab′, scFab, Fv, scFv, or single domain antibody.

[0715] In an embodiment of the above aspects, at least one of amino acid residues from which the bonds between the antigen-binding domains originate is present within a constant region. In certain embodiments, the amino acid residue is present within a CH1 region, and for example, it is present at a position selected from the group consisting of positions 119, 122, 123, 131, 132, 133, 134, 135, 136, 137, 139, 140, 148, 150, 155, 156, 157, 159, 160, 161, 162, 163, 165, 167, 174, 176, 177, 178, 190, 191, 192, 194, 195, 197, 213, and 214 according to EU numbering in the CH1 region. In an exemplary embodiment, the amino acid residue is present at position 191 according to EU numbering in the CH1 region, and the amino acid residues at position 191 according to EU numbering in the CH1 region of the two antigen-binding domains are linked with each other to form a bond.

[0716] In some embodiments of the above aspects, one disulfide bond is formed between the amino acid residues at position 191 according to EU numbering in the respective CH1 regions of the first antigen-binding domain and the second antigen-binding domain.

[0717] In some embodiments of the above aspects, additional one, two or more disulfide bond(s) is/are formed between the first antigen-binding domain and the second antigen-binding domain via the amino acid residues at the following positions according to EU numbering in each of the respective CH1 regions of the first antigen-binding domain and the second antigen-binding domain:
[0718] (a) between amino acid residues at any position of 131 to 138, 194 and 195 in each of the two antigen-binding domains;
[0719] (b) between the amino acid residues at position 131 in each of the two antigen-binding domains, and between the amino acid residues at position 194 in each of the two antigen-binding domains;
[0720] (c) between the amino acid residues at position 132 in each of the two antigen-binding domains, and between the amino acid residues at position 194 in each of the two antigen-binding domains;
[0721] (d) between the amino acid residues at position 133 in each of the two antigen-binding domains, and between the amino acid residues at position 194 in each of the two antigen-binding domains;
[0722] (e) between the amino acid residues at position 134 in each of the two antigen-binding domains, and between the amino acid residues at position 194 in each of the two antigen-binding domains;
[0723] (f) between the amino acid residues at position 135 in each of the two antigen-binding domains, and between the amino acid residues at position 194 in each of the two antigen-binding domains;
[0724] (g) between the amino acid residues at position 136 in each of the two antigen-binding domains, and between the amino acid residues at position 194 in each of the two antigen-binding domains;
[0725] (h) between the amino acid residues at position 137 in each of the two antigen-binding domains, and between the amino acid residues at position 194 in each of the two antigen-binding domains;
[0726] (i) between the amino acid residues at position 138 in each of the two antigen-binding domains, and between the amino acid residues at position 194 in each of the two antigen-binding domains;
[0727] (j) between the amino acid residues at position 131 in each of the two antigen-binding domains, and between the amino acid residues at position 195 in each of the two antigen-binding domains;
[0728] (k) between the amino acid residues at position 132 in each of the two antigen-binding domains, and between the amino acid residues at position 195 in each of the two antigen-binding domains;
[0729] (l) between the amino acid residues at position 133 in each of the two antigen-binding domains, and between the amino acid residues at position 195 in each of the two antigen-binding domains;
[0730] (m) between the amino acid residues at position 134 in each of the two antigen-binding domains, and between the amino acid residues at position 195 in each of the two antigen-binding domains;
[0731] (n) between the amino acid residues at position 135 in each of the two antigen-binding domains, and between the amino acid residues at position 195 in each of the two antigen-binding domains;
[0732] (o) between the amino acid residues at position 136 in each of the two antigen-binding domains, and between the amino acid residues at position 195 in each of the two antigen-binding domains;
[0733] (p) between the amino acid residues at position 137 in each of the two antigen-binding domains, and between the amino acid residues at position 195 in each of the two antigen-binding domains; and
[0734] (q) between the amino acid residues at position 138 in each of the two antigen-binding domains, and between the amino acid residues at position 195 in each of the two antigen-binding domains.

[0735] In some embodiments of the above aspects, any one of the first and second antigen-binding domains comprises one, two or more charged amino acid residues at position 136-138 (according to EU numbering) in the respective CH1 region; and the other antigen-binding domain out of the first and second antigen-binding domains comprises one, two or more oppositely charged amino acid residues at position 193-195 (according to EU numbering) in the respective CH1 region.

[0736] In some embodiments of the above aspects, any one of the first and second antigen-binding domains comprises one, two or more positively charged amino acid residues at position 136-138 (according to EU numbering) in the respective CH1 region; and the other antigen-binding domain out of the first and second antigen-binding domains comprises one, two or more negatively charged amino acid residues at position 193-195 (according to EU numbering) in the respective CH1 region.

[0737] In some embodiments of the above aspects, any one of the first and second antigen-binding domains comprises one, two or more negatively charged amino acid residues at position 136-138 (according to EU numbering) in the respective CH1 region; and the other antigen-binding domain out of the first and second antigen-binding domains comprises one, two or more positively charged amino acid residues at position 193-195 (according to EU numbering) in the respective CH1 region.

[0738] In some embodiments of the above aspects, any one of the first and second antigen-binding domains comprises one, two or more of the following amino acid residues in the respective CH1 region (according to EU numbering):
[0739] (a) the amino acid residue at position 136 which is glutamic acid (E) or aspartic acid (D);
[0740] (b) the amino acid residue at position 137 which is glutamic acid (E) or aspartic acid (D);
[0741] (c) the amino acid residue at position 138 which is glutamic acid (E) or aspartic acid (D); and
[0742] the other antigen-binding domain of the first and second antigen-binding domains comprises one, two or more of the following amino acid residues in the respective CH1 region (according to EU numbering):
[0743] (d) the amino acid residue at position 193 which is lysine (K), arginine (R), or histidine (H);
[0744] (e) the amino acid residue at position 194 which is lysine (K), arginine (R), or histidine (H); and
[0745] (f) the amino acid residue at position 195 which is lysine (K), arginine (R), or histidine (H).

[0746] In some embodiments of the above as aspects, any one of the first and second antigen-binding domains comprises one or more of the following amino acid residues in the respective CH1 region (according to EU numbering):
[0747] (a) the amino acid residue at position 136 which is lysine (K), arginine (R), or histidine (H);
[0748] (b) the amino acid residue at position 137 which is lysine (K), arginine (R), or histidine (H);
[0749] (c) the amino acid residue at position 138 which is lysine (K), arginine (R), or histidine (H); and
   [0750] the other antigen-binding domain of the first and second antigen-binding domains comprises one or more of the following amino acid residues in the respective CH1 region (according to EU numbering):
[0751] (d) the amino acid residue at position 193 which is glutamic acid (E) or aspartic acid (D);
[0752] (e) the amino acid residue at position 194 which is glutamic acid (E) or aspartic acid (D); and
[0753] (f) the amino acid residue at position 195 which is glutamic acid (E) or aspartic acid (D).

[0754] In some embodiments of the above aspects, any one of the first and second antigen-binding domains comprises one, two or more hydrophobic amino acid residues at position 136-138 (according to EU numbering) in the respective CH1 region; and the other antigen-binding domain out of the first and second antigen-binding domains comprises one, two or more hydrophobic amino acid residues at position 193-195 (according to EU numbering) in the respective CH1 region.

[0755] In some embodiments of the above aspects, the hydrophobic amino acid residue(s) is/are alanine (Ala), valine (Val), leucine (Leu), isoleucine (Ile), phenylalanine (Phe), and/or tryptophan (Trp).

[0756] In some embodiments of the above aspects, any one of the first and second antigen-binding domains comprises one “knob” amino acid residues at position 136-138 (according to EU numbering) in the respective CH1 region; and the other antigen-binding domain out of the first and second antigen-binding domains comprises one, two or more “hole” amino acid residues at position 193-195 (according to EU numbering) in the respective CH1 region. In some embodiments of the above aspects, any one of the first and second antigen-binding domains comprises one, two or more “hole” amino acid residues at position 136-138 (according to EU numbering) in the respective CH1 region; and the other antigen-binding domain out of the first and second antigen-binding domains comprises one “knob” amino acid residues at position 193-195 (according to EU numbering) in the respective CH1 region. In some embodiments, said “knob” amino acid residue(s) is/are selected from the group consisting of tryptophan (Trp) and phenylalanine (Phe); and said “hole” amino acid residue(s) is/are selected from the group consisting of alanine (Ala), valine (Val), threonine (T) or serine (S).

[0757] In some embodiments of the above aspects, any one of the first and second antigen-binding domains comprises one, two or more aromatic amino acid residues at position 136-138 (according to EU numbering) in the respective CH1 region; and the other antigen-binding domain out of the first and second antigen-binding domains comprises one, two or more positively charged amino acid residues at position 193-195 (according to EU numbering) in the respective CH1 region. In some embodiments of the above aspects, any one of the first and second antigen-binding domains comprises one, two or more positively charged amino acid residues at position 136-138 (according to EU numbering) in the respective CH1 region; and the other antigen-binding domain out of the first and second antigen-binding domains comprises one, two or more aromatic amino acid residues at position 193-195 (according to EU numbering) in the respective CH1 region. In some embodiments, said aromatic amino acid residue(s) is/are selected from the group consisting of tryptophan (Trp), tyrosine (Tyr), histidine (His), and phenylalanine (Phe); and said positively charged amino acid residue(s) is/are selected from a group consisting of lysine (K), arginine (R), or histidine (H).

[0758] In certain embodiments, at least one of amino acid residues from which the bonds between the antigen-binding domains originate is present within a hinge region, and for example, it is present at a position selected from the group consisting of positions 216, 218, and 219 according to EU numbering in the hinge region.

[0759] In certain embodiments, at least one of amino acid residues from which the bonds between the antigen-binding domains originate is present within a CL region, and for example, it is present at a position selected from the group consisting of positions 109, 112, 121, 126, 128, 151, 152, 153, 156, 184, 186, 188, 190, 200, 201, 202, 203, 208, 210, 211, 212, and 213 according to EU numbering in the CL region. In an exemplary embodiment, the amino acid residue is present at position 126 according to EU numbering in the CL region, and the amino acid residues at position 126 according to EU numbering in the CL region of the two antigen-binding domains are linked with each other to form a bond.

[0760] In certain embodiments, an amino acid residue in the CH1 region of the first antigen-binding domain and an amino acid residue in the CL region of the second antigen-binding domain are linked to form a bond. In an exemplary embodiment, an amino acid residue at position 191 according to EU numbering in the CH1 region of the first antigen-binding domain and an amino acid residue at position 126 according to EU numbering in the CL region of the second antigen-binding domain are linked to form a bond.

[0761] In an embodiment of the above aspects, the constant region is derived from human. In certain embodiments, the subclass of the heavy chain constant region is any of IgG1, IgG2, IgG3, IgG4, IgA1, IgA2, IgM, IgD, and IgE. In certain embodiments, the subclass of the CH1 region is any of gamma 1, gamma 2, gamma 3, gamma 4, alpha 1, alpha 2, mu, delta, and epsilon. In certain embodiments, the subclass of the CL region is kappa or lambda.

[0762] In an embodiment of the above aspects, at least one of amino acid residues from which the bonds between the antigen-binding domains originate is present within a variable region. In certain embodiments, the amino acid residue is present within a VH region, and for example, it is present at a position selected from the group consisting of positions 8, 16, 28, 74, and 82b according to Kabat numbering in the VH region. In certain embodiments, the amino acid residue is present within a VL region, and for example, it is present at a position selected from the group consisting of positions 100, 105, and 107 according to Kabat numbering in the VL region.

[0763] In an embodiment of the above aspects, both the first and second antigen-binding domains comprise a Fab and a hinge region.

[0764] In certain embodiments, at least one of amino acid residues from which the bonds between the antigen-binding domains originate is an amino acid residue present in a wild-type Fab or hinge region, and for example, it is a cysteine residue in the hinge region. Examples of such cysteine residues include the cysteine residues at positions 226 and 229 according to EU numbering.

[0765] In certain other embodiments, at least one of amino acid residues from which the bonds between the antigen-binding domains originate is a mutated amino acid residue which is not present in a wild-type Fab or hinge region, and for example, it is a cysteine residue which is not present in a wild-type Fab or hinge region. Such a mutated amino acid residue can be introduced into a wild-type Fab or hinge region by, for example, a method of amino acid substitution. The present specification discloses the sites of amino acid residues from which the bonds between the antigen-binding domains can originate for each of the CH1, hinge, CL, VH, and VL regions, and for example, cysteine residues can be introduced into such sites.

[0766] Alternatively, in another embodiment, an amino acid residue that is present in a wild-type Fab or hinge region and which is involved in a bond between the antigen-binding domains (for example, a cysteine residue) can be substituted with another amino acid or deleted. Examples of such cysteine residues include the cysteine residues at positions 220, 226, and 229 according to EU numbering in the hinge region, and the cysteine residue at position 214 in the CL region.

[0767] In certain embodiments, the antigen-binding molecule of the present disclosure is F(ab′)2 in which both the first and second antigen-binding domains comprise a Fab and a hinge region.

[0768] In an embodiment of the above aspects, at least one of the first and second antigen-binding domains comprises a non-antibody protein binding to a particular antigen, or a fragment thereof. In certain embodiments, the non-antibody protein is either of a pair of a ligand and a receptor which specifically bind to each other. Such receptors include, for example, receptors belonging to cytokine receptor superfamilies, G protein-coupled receptors, ion channel receptors, tyrosine kinase receptors, immune checkpoint receptors, antigen receptors, CD antigens, costimulatory molecules, and cell adhesion molecules.

[0769] In an embodiment of the above aspects, the antigen-binding molecule of the present disclosure further comprises an Fc region, and for example, it is a full-length antibody. In certain embodiments, one or more amino acid mutations promoting multimerization of Fc regions are introduced into the Fc region of the antigen-binding molecule of the present disclosure. Such amino acid mutations include, for example, the amino acid mutations at at least one position selected from the group consisting of positions 247, 248, 253, 254, 310, 311, 338, 345, 356, 359, 382, 385, 386, 430, 433, 434, 436, 437, 438, 439, 440, and 447 according to EU numbering (see, e.g., WO 2016/164480). In certain embodiments, the multimerization is hexamerization.

### <Antigens Bound by Antigen-Binding Molecules>

[0770] In an embodiment of the above aspects, both the first and second antigen-binding domains bind to the same antigen. In certain embodiments, both the first and second antigen-binding domains bind to the same epitope on the same antigen. In certain other embodiments, each of the first and second antigen-binding domains binds to a different epitope on the same antigen. In certain embodiments, the antigen-binding molecule of the present disclosure is a biparatopic antigen-binding molecule (for example, biparatopic antibody) that targets one specific antigen.

[0771] In an embodiment of the above aspects, each of the first and second antigen-binding domains binds to a different antigen.

[0772] In another embodiment of the above aspects, the antigen-binding molecule of the present disclosure is a clamping antigen-binding molecule (for example, clamping antibody). Herein, a clamping antigen-binding molecule refers to an antigen-binding molecule that specifically binds to an antigen/antigen-binding molecule complex formed by a certain antigen A and an antigen-binding molecule binding to the antigen A, and thereby increases the activity of the antigen-binding molecule binding to the antigen A to bind the antigen A (or stabilize the antigen/antigen-binding molecule complex formed by the antigen A and the antigen-binding molecule binding to the antigen A). For example, a CD3 clamping antibody is able to bind to an antigen-antibody complex formed by CD3 and an antibody with attenuated binding ability to CD3 (binding-attenuated CD3 antibody), and thereby increase the CD3-binding activity of the binding-attenuated CD3 antibody (or stabilize the antigen-antibody complex formed by CD3 and the binding-attenuated CD3 antibody). In certain embodiments, the first and/or second antigen-binding domains in the antigen-binding molecule of the present disclosure may be antigen-binding domains derived from clamping antigen-binding molecules (clamping antigen-binding domains).

[0773] In an embodiment of the above aspects, both the first and second antigen-binding domains have the same amino acid sequence. In another embodiment, each of the first and second antigen-binding domains has a different amino acid sequence.

[0774] In an embodiment of the above aspects, at least one of two antigens to which the first and second antigen-binding domains bind is a soluble protein or a membrane protein.

### <Functions of Antigen-Binding Molecules>

[0775] In an embodiment of the above aspects, the antigen-binding molecule of the present disclosure has activity of holding two antigen molecules at spatially close positions. In certain embodiments, the antigen-binding molecule of the present disclosure is capable of holding two antigen molecules at closer positions than a control antigen-binding molecule, and the control antigen-binding molecule differs from the antigen-binding molecule of the present disclosure only in that the control antigen-binding molecule has one less bond between the two antigen-binding domains. In a further embodiment, the one less bond can be selected from bonds in which the amino acid residues from which the bonds between the antigen-binding domains originate are derived from mutated amino acid residues which are not present in a wild-type Fab or hinge region (for example, cysteine residues which are not present in the wild-type Fab or hinge region).

[0776] In an embodiment of the above aspects, the antigen-binding molecule of the present disclosure has activity of regulating interaction between two antigen molecules. Without being bound by a particular theory, the activity of regulating interaction is thought to be resulted from holding two antigen molecules at spatially closer positions by the antigen-binding molecule of the present disclosure. In certain embodiments, the antigen-binding molecule of the present disclosure is capable of enhancing or diminishing interaction between two antigen molecules as compared to a control antigen-binding molecule, and the control antigen-binding molecule differs from the antigen-binding molecule of the present disclosure only in that the control antigen-binding molecule has one less bond between the two antigen-binding domains. In a further embodiment, the one less bond can be selected from bonds in which the amino acid residues from which the bonds between the antigen-binding domains originate are derived from mutated amino acid residues which are not present in a wild-type Fab or hinge region (for example, cysteine residues which are not present in the wild-type Fab or hinge region).

[0777] In certain embodiments, the two antigen molecules bound by the antigen-binding molecule of the present disclosure are a ligand and a receptor thereof, respectively, and the antigen-binding molecule of the present disclosure has activity of promoting activation of the receptor by the ligand. In certain other embodiment, the two antigen molecules bound by the antigen-binding molecule of the present disclosure are an enzyme and a substrate thereof, respectively, and the antigen-binding molecule of the present disclosure has activity of promoting catalytic reaction of the enzyme with the substrate.

[0778] Further, in certain other embodiments, both of the two antigen molecules bound by the antigen-binding molecule of the present disclosure are antigens (for example, proteins) present on cellular surfaces, and the antigen-binding molecule of the present disclosure has activity of promoting interaction between a cell expressing the first antigen and a cell expressing the second antigen. For example, the cell expressing the first antigen and the cell expressing the second antigen are, respectively, a cell with cytotoxic activity and a target cell thereof, and the antigen-binding molecule of the present disclosure promotes damage of the target cell by the cell with cytotoxic activity. The cell with cytotoxic activity is, for example, a T cell, NK cell, monocyte, or macrophage.

[0779] In an embodiment of the above aspects, the antigen-binding molecule of the present disclosure has activity of regulating activation of two antigen molecules which are activated by association with each other. Without being bound by a particular theory, the activity of regulating activation is thought to be resulted from holding two antigen molecules at spatially closer positions by the antigen-binding molecule of the present disclosure. In certain embodiments, the antigen-binding molecule of the present disclosure can enhance or diminish activation of two antigen molecules as compared to a control antigen-binding molecule, and the control antigen-binding molecule differs from the antigen-binding molecule of the present disclosure only in that the control antigen-binding molecule has one less bond between the two antigen-binding domains. In a further embodiment, the one less bond can be selected from bonds in which the amino acid residues from which the bonds between the antigen-binding domains originate are derived from mutated amino acid residues which are not present in a wild-type Fab or hinge region (for example, cysteine residues which are not present in the wild-type Fab or hinge region). For example, such antigen molecules are selected from the group consisting of receptors belonging to cytokine receptor superfamilies, G protein-coupled receptors, ion channel receptors, tyrosine kinase receptors, immune checkpoint receptors, antigen receptors, CD antigens, costimulatory molecules, and cell adhesion molecules.

[0780] In an embodiment of the above aspects, the antigen-binding molecule of the present disclosure has resistance to protease cleavage. In certain embodiments, the antigen-binding molecule of the present disclosure has increased resistance to protease cleavage as compared to a control antigen-binding molecule, and the control antigen-binding molecule differs from the antigen-binding molecule of the present disclosure only in that the control antigen-binding molecule has one less bond between the two antigen-binding domains. In a further embodiment, the one less bond can be selected from bonds in which the amino acid residues from which the bonds between the antigen-binding domains originate are derived from mutated amino acid residues which are not present in a wild-type Fab or hinge region (for example, cysteine residues which are not present in the wild-type Fab or hinge region). In certain embodiments, in the antigen-binding molecule of the present disclosure, the proportion of the full-length molecule (for example, full-length IgG molecule) remaining after protease treatment is increased as compared to the control antigen-binding molecule. In certain embodiments, in the antigen-binding molecule of the present disclosure, the proportion of a particular fragment (for example, Fab monomer) produced after protease treatment is reduced as compared to the control antigen-binding molecule.

[0781] In an embodiment of the above aspects, when the antigen-binding molecule of the present disclosure is treated with a protease, a dimer of the antigen-binding domains or fragments thereof (for example, crosslinked Fab dimer) is excised. In certain embodiments, when the control antigen-binding molecule, which differs from the antigen-binding molecule of the present disclosure only in that it has one less bond between the two antigen-binding domains, is treated with the protease, monomers of the antigen-binding domains or fragments thereof are excised. In a further embodiment, the one less bond can be selected from bonds in which the amino acid residues from which the bonds between the antigen-binding domains originate are derived from mutated amino acid residues which are not present in a wild-type Fab or hinge region (for example, cysteine residues which are not present in the wild-type Fab or hinge region). In these embodiments, the protease can cleave the hinge region of the antigen-binding molecule.

### <Pharmaceutical Compositions >

[0782] In an aspect, the present disclosure provides a pharmaceutical composition comprising the antigen-binding molecule of the present disclosure and a pharmaceutically acceptable carrier.

### <Use of Antigen-Binding Molecules>

[0783] In an aspect, the present disclosure provides a method for holding two antigen molecules at spatially close positions, comprising:
[0784] (a) providing an antigen-binding molecule comprising two antigen-binding domains, wherein the two antigen-binding domains are linked with each other via one or more bonds,
[0785] (b) adding to the antigen-binding molecule another bond which links the two antigen-binding domains with each other, and
[0786] (c) contacting the antigen-binding molecule produced in (b) with the two antigen-binding molecules.

[0787] In certain embodiments, some or all of the one or more bonds recited in (a) above are bonds in which the amino acid residues from which the bonds between the antigen-binding domains originate are derived from amino acid residues which are present in a wild-type Fab or hinge region (for example, cysteine residues in the hinge region). In a further embodiment, said another bond recited in (b) above is a bond in which the amino acid residues from which the bond between the antigen-binding domains originates are derived from mutated amino acid residues which are not present in a wild-type Fab or hinge region (for example, cysteine residues which are not present in the wild-type Fab or hinge region). The present disclosure also provides a method for holding two antigen molecules at spatially close positions which comprises contacting two antigen molecules with the antigen-binding molecule or pharmaceutical composition of the present disclosure. The present disclosure further provides an antigen-binding molecule or pharmaceutical composition of the present disclosure for use in holding two antigen molecules at spatially close positions.

[0788] In another aspect, the present disclosure provides a method for regulating interaction between two antigen molecules, comprising:
[0789] (a) providing an antigen-binding molecule comprising two antigen-binding domains, wherein the two antigen-binding domains are linked with each other via one or more bonds,
[0790] (b) adding to the antigen-binding molecule another bond which links the two antigen-binding domains with each other, and
[0791] (c) contacting the antigen-binding molecule produced in (b) with the two antigen-binding molecules.

[0792] In certain embodiments, some or all of the one or more bonds recited in (a) above are bonds in which the amino acid residues from which the bonds between the antigen-binding domains originate are derived from amino acid residues which are present in a wild-type Fab or hinge region (for example, cysteine residues in the hinge region). In a further embodiment, said another bond recited in (b) above is a bond in which the amino acid residues from which the bond between the antigen-binding domains originates are derived from mutated amino acid residues which are not present in a wild-type Fab or hinge region (for example, cysteine residues which are not present in the wild-type Fab or hinge region). The present disclosure also provides a method for regulating interaction between two antigen molecules which comprises contacting two antigen molecules with the antigen-binding molecule or pharmaceutical composition of the present disclosure. The present disclosure further provides an antigen-binding molecule or pharmaceutical composition of the present disclosure for use in regulating interaction between two antigen molecules.

[0793] Further, in another aspect, the present disclosure provides a method for regulating activity of two antigen molecules which are activated by association with each other, comprising:
[0794] (a) providing an antigen-binding molecule comprising two antigen-binding domains, wherein the two antigen-binding domains are linked with each other via one or more bonds,
[0795] (b) adding to the antigen-binding molecule another bond which links the two antigen-binding domains with each other, and
[0796] (c) contacting the antigen-binding molecule produced in (b) with the two antigen-binding molecules.

[0797] In certain embodiments, some or all of the one or more bonds recited in (a) above are bonds in which the amino acid residues from which the bonds between the antigen-binding domains originate are derived from amino acid residues which are present in a wild-type Fab or hinge region (for example, cysteine residues in the hinge region). In a further embodiment, said another bond recited in (b) above is a bond in which the amino acid residues from which the bond between the antigen-binding domains originates are derived from mutated amino acid residues which are not present in a wild-type Fab or hinge region (for example, cysteine residues which are not present in the wild-type Fab or hinge region). The present disclosure also provides a method for regulating activity of two antigen molecules which are activated by association with each other, which comprises contacting two antigen molecules with the antigen-binding molecule or pharmaceutical composition of the present disclosure. The present disclosure further provides an antigen-binding molecule or pharmaceutical composition of the present disclosure for use in regulating activity of two antigen molecules which are activated by association with each other.

[0798] Furthermore, in another aspect, the present disclosure provides a method for increasing resistance of an antigen-binding molecule to protease cleavage, comprising:
[0799] (a) providing an antigen-binding molecule comprising two antigen-binding domains, wherein the two antigen-binding domains are linked with each other via one or more bonds, and
[0800] (b) adding to the antigen-binding molecule another bond which links the two antigen-binding domains with each other.

[0801] In certain embodiments, some or all of the one or more bonds recited in (a) above are bonds in which the amino acid residues from which the bonds between the antigen-binding domains originate are derived from amino acid residues which are present in a wild-type Fab or hinge region (for example, cysteine residues in the hinge region). In a further embodiment, said another bond recited in (b) above is a bond in which the amino acid residues from which the bond between the antigen-binding domains originates are derived from mutated amino acid residues which are not present in a wild-type Fab or hinge region (for example, cysteine residues which are not present in the wild-type Fab or hinge region).

[0802] The antigen-binding molecule used in these various methods may have the characteristics of the antigen-binding molecules described herein.

### <Methods for Producing Antigen-Binding Molecules>

[0803] In an aspect, the present disclosure provides a method for producing an antigen-binding molecule which has activity of holding two antigen molecules at spatially close positions, comprising:
[0804] (a) providing a nucleic acid encoding a polypeptide comprising a first antigen-binding domain and a nucleic acid encoding a polypeptide comprising a second antigen-binding domain, wherein each of the two antigen-binding domains comprises one or more amino acid residues from which a bond for linking the two antigen-binding domains originates,
[0805] (b) introducing a mutation into the nucleic acids encoding the two antigen-binding domains such that another bond linking the two antigen-binding domains is added,
[0806] (c) introducing the nucleic acids produced in (b) into a host cell,
[0807] (d) culturing the host cell such that the two polypeptides are expressed, and
[0808] (e) obtaining an antigen-binding molecule which is a polypeptide comprising the first and second antigen-binding domains, wherein the two antigen-binding domains are linked with each other via two or more bonds.

[0809] In certain embodiments, some or all of the one or more amino acid residues recited in (a) above from which the bond between the antigen-binding domains originates are amino acid residues which are present in a wild-type Fab or hinge region (for example, cysteine residues in the hinge region). In a further embodiment, said another bond recited in (b) above is a bond in which the amino acid residues from which the bond between the antigen-binding domains originates are derived from mutated amino acid residues which are not present in a wild-type Fab or hinge region (for example, cysteine residues which are not present in the wild-type Fab or hinge region).

[0810] In another aspect, the present disclosure provides a method for producing an antigen-binding molecule which has activity of regulating interaction between two antigen molecules, comprising:
[0811] (a) providing a nucleic acid encoding a polypeptide comprising a first antigen-binding domain and a nucleic acid encoding a polypeptide comprising a second antigen-binding domain, wherein each of the two antigen-binding domains comprises one or more amino acid residues from which a bond for linking the two antigen-binding domains originates,
[0812] (b) introducing a mutation into the nucleic acids encoding the two antigen-binding domains such that another bond linking the two antigen-binding domains is added,
[0813] (c) introducing the nucleic acids produced in (b) into a host cell,
[0814] (d) culturing the host cell such that the two polypeptides are expressed, and
[0815] (e) obtaining an antigen-binding molecule which is a polypeptide comprising the first and second antigen-binding domains, wherein the two antigen-binding domains are linked with each other via two or more bonds.

[0816] In certain embodiments, some or all of the one or more amino acid residues recited in (a) above from which the bond between the antigen-binding domains originates are amino acid residues which are present in a wild-type Fab or hinge region (for example, cysteine residues in the hinge region). In a further embodiment, said another bond recited in (b) above is a bond in which the amino acid residues from which the bond between the antigen-binding domains originates are derived from mutated amino acid residues which are not present in a wild-type Fab or hinge region (for example, cysteine residues which are not present in the wild-type Fab or hinge region).

[0817] Further, in another aspect, the present disclosure provides a method for producing an antigen-binding molecule which has activity of regulating activation of two antigen molecules which are activated by association with each other, comprising:
[0818] (a) providing a nucleic acid encoding a polypeptide comprising a first antigen-binding domain and a nucleic acid encoding a polypeptide comprising a second antigen-binding domain, wherein each of the two antigen-binding domains comprises one or more amino acid residues from which a bond for linking the two antigen-binding domains originates,
[0819] (b) introducing a mutation into the nucleic acids encoding the two antigen-binding domains such that another bond linking the two antigen-binding domains is added,
[0820] (c) introducing the nucleic acids produced in (b) into a host cell,
[0821] (d) culturing the host cell such that the two polypeptides are expressed, and
[0822] (e) obtaining an antigen-binding molecule which is a polypeptide comprising the first and second antigen-binding domains, wherein the two antigen-binding domains are linked with each other via two or more bonds.

[0823] In certain embodiments, some or all of the one or more amino acid residues recited in (a) above from which the bond between the antigen-binding domains originates are amino acid residues which are present in a wild-type Fab or hinge region (for example, cysteine residues in the hinge region). In a further embodiment, said another bond recited in (b) above is a bond in which the amino acid residues from which the bond between the antigen-binding domains originates are derived from mutated amino acid residues which are not present in a wild-type Fab or hinge region (for example, cysteine residues which are not present in the wild-type Fab or hinge region).

[0824] Furthermore, in another aspect, the present disclosure provides a method for producing an antigen-binding molecule which has increased resistance to protease cleavage, comprising:
[0825] (a) providing a nucleic acid encoding a polypeptide comprising a first antigen-binding domain and a nucleic acid encoding a polypeptide comprising a second antigen-binding domain, wherein each of the two antigen-binding domains comprises one or more amino acid residues from which a bond for linking the two antigen-binding domains originates,
[0826] (b) introducing a mutation into the nucleic acids encoding the two antigen-binding domains such that another bond linking the two antigen-binding domains is added,
[0827] (c) introducing the nucleic acids produced in (b) into a host cell,
[0828] (d) culturing the host cell such that the two polypeptides are expressed, and
[0829] (e) obtaining an antigen-binding molecule which is a polypeptide comprising the first and second antigen-binding domains, wherein the two antigen-binding domains are linked with each other via two or more bonds.

[0830] In certain embodiments, some or all of the one or more amino acid residues recited in (a) above from which the bond between the antigen-binding domains originates are amino acid residues which are present in a wild-type Fab or hinge region (for example, cysteine residues in the hinge region). In a further embodiment, said another bond recited in (b) above is a bond in which the amino acid residues from which the bond between the antigen-binding domains originates are derived from mutated amino acid residues which are not present in a wild-type Fab or hinge region (for example, cysteine residues which are not present in the wild-type Fab or hinge region).

[0831] The antigen-binding molecule produced in these various aspects may have the characteristics of the antigen-binding molecules described herein.

### <Methods of Screening for Antigen-Binding Molecules>

[0832] In another aspect, the present disclosure provides a method for identifying a novel pair of protein molecules which are activated by association with each other, comprising:
[0833] (a) providing two arbitrary protein molecules,
[0834] (b) producing, by the production method of the present disclosure, an antigen-binding molecule comprising two antigen-binding domains which respectively bind to the two protein molecules, wherein the antigen-binding molecule has activity of holding the two protein molecules at close positions,
[0835] (c) contacting the antigen-binding molecule produced in (b) with the two protein molecules, and
[0836] (d) assessing whether or not the two protein molecules are activated.

[0837] In certain embodiments, at least one of the protein molecules is selected from the group consisting of receptors belonging to cytokine receptor superfamilies, G protein-coupled receptors, ion channel receptors, tyrosine kinase receptors, immune checkpoint receptors, antigen receptors, CD antigens, costimulatory molecules, and cell adhesion molecules.

### <Linkage of Antigen-Binding Domains>

[0838] In a non-limiting embodiment, two or more antigen-binding domains contained in an antigen-binding molecule of the present disclosure are linked with each other via one or more bonds. In a preferred embodiment, an antigen-binding domain contained in an antigen-binding molecule of the present disclosure has, by itself, activity to bind to an antigen. In such an embodiment, the antigen-binding molecule of the present disclosure containing two antigen-binding domains can bind to two or more antigen molecules; the antigen-binding molecule of the present disclosure containing three antigen-binding domains can bind to three or more antigen molecules; the antigen-binding molecule of the present disclosure containing four antigen-binding domains can bind to four or more antigen molecules; and the antigen-binding molecule of the present disclosure containing N antigen-binding domains can bind to N or more antigen molecules.

[0839] In certain embodiments, at least one of the bonds between the antigen-binding domains contained in an antigen-binding molecule of the present disclosure is different from a bond found in a naturally-occurring antibody (for example, in a wild-type Fab or hinge region). Examples of the bonds found between the antigen-binding domains of a naturally-occurring antibody (for example, naturally-occurring IgG antibody) include disulfide bonds in the hinge region. Bonds between amino acid residues positioned in a region other than the hinge region may be bonds between amino acid residues within an antibody fragment (for example, Fab), and they include bonds between the heavy chains (HH), bonds between the light chains (LL), and bonds between the heavy and light chains (HL or LH) (see FIG. 21). Examples of the amino acid residues in the heavy or light chain from which the bonds between the antigen-binding domains originate include amino acid residues at the above-mentioned positions within the variable region (VH region or VL region) or within the constant region (CH1 region, hinge region, or CL region).

[0840] In a non-limiting embodiment, the bonds between the antigen-binding domains may originate from multiple amino acid residues present at positions separate from each other in the primary structure in at least one of two or more antigen-binding domains contained in an antigen-binding molecule of the present disclosure. The distance between the multiple amino acid residues is a distance that allows the achievement of the structures of two or more, sufficiently close antigen-binding domains as a result of linkage between the antigen-binding domains by the bonds which originate from the amino acid residues. The distance between the multiple amino acid residues may be, for example, 4 amino acids or more, 5 amino acids or more, 6 amino acids or more, 7 amino acids or more, 8 amino acids or more, 9 amino acids or more, 10 amino acids or more, 11 amino acids or more, 12 amino acids or more, 13 amino acids or more, 14 amino acids or more, 15 amino acids or more, 20 amino acids or more, 25 amino acids or more, 30 amino acids or more, 35 amino acids or more, 40 amino acids or more, 45 amino acids or more, 50 amino acids or more, 60 amino acids or more, 70 amino acids or more, 80 amino acids or more, 90 amino acids or more, 100 amino acids or more, 110 amino acids or more, 120 amino acids or more, 130 amino acids or more, 140 amino acids or more, 150 amino acids or more, 160 amino acids or more, 170 amino acids or more, 180 amino acids or more, 190 amino acids or more, 200 amino acids or more, 210 amino acids or more, or 220 amino acids or more.

[0841] Further, the number of the bonds between the antigen-binding domains and the number of the amino acid residues from which the bonds originate are a number that allows the achievement of the structures of two or more, sufficiently close antigen-binding domains as a result of linkage between the antigen-binding domains by the bonds. The number may be, for example, two or more, three or more, four or more, five or more, six or more, seven or more, eight or more, nine or more, or ten or more.

[0842] In certain embodiments, as long as the structures of two or more, sufficiently close antigen-binding domains are achieved as a result of linkage between the antigen-binding domains by three or more bonds which respectively originate from three or more amino acid residues in the antigen-binding domains, the distance in the primary structure between any two amino acid residues selected from the three amino acid residues may be seven amino acids or more in at least one amino acid residue pair, and may be less than seven amino acids in the remainder of amino acid residue pairs.

[0843] In connection with antigen-binding domains contained in antigen-binding molecules of the present disclosure, “sufficiently close” means that two or more antigen-binding domains are close to the extent that this is sufficient for achieving the desired functions (activities) of the antigen-binding molecule of the present disclosure. Examples of the desired functions (activities) include activity of holding two antigen molecules at spatially close positions; activity of regulating interaction between two antigen molecules; activity of promoting activation of a receptor by a ligand; activity of promoting catalytic reaction of an enzyme with a substrate; activity of promoting interaction between a cell expressing a first antigen and a cell expressing a second antigen; activity of promoting damage of a target cell by a cell with cytotoxic activity (such as a T cell, NK cell, monocyte, macrophage); activity of regulating activation of two antigen molecules which are activated by association with each other; and resistance to protease cleavage of the antigen-binding molecules.

[0844] In a non-limiting embodiment, the bond between the antigen-binding domains contained in an antigen-binding molecule of the present disclosure may be a covalent bond or a non-covalent bond. The covalent bond may be a covalent bond formed by directly crosslinking an amino acid residue in a first antigen-binding domain and an amino acid residue of a second antigen-binding domain, for example, a disulfide bond between cysteine residues. The directly crosslinked amino acid residue may be present in an antibody fragment such as Fab, or within a hinge region.

[0845] In another embodiment, a covalent bond is formed by crosslinking an amino acid residue in a first antigen-binding domain and an amino acid residue of a second antigen-binding domain via a crosslinking agent. For example, when an amine-reactive crosslinking agent is used for crosslinking, the crosslinkage can be made via a free amino group of the N-terminal amino acid of the antigen-binding domain, or a primary amine of the side chain of a lysine residue in the antigen-binding domain. Amine-reactive crosslinking agents include a functional group that forms a chemical bond with a primary amine, such as isothiocyanate, isocyanate, acyl azide, NHS ester, sulfonyl chloride, aldehyde, glyoxal, epoxide, oxirane, carbonate, aryl halide, imide ester, carbodiimide, anhydride, and fluoroester. Representative examples include DSG (disuccinimidyl glutarate), DSS (disuccinimidyl suberate), BS3 (bis(sulfosuccinimidyl) suberate), DSP (dithiobis(succinimidyl propionate)), DTSSP (3,3′-dithiobis (sulfosuccinimidyl propionate)), DST (disuccinimidyl tartrate), BSOCOES (bis(2-(succinimidooxycarbonyloxy) ethyl)sulfone), EGS (ethylene glycol bis(succinimidyl succinate)), Sulfo-EGS (ethylene glycol bis(sulfosuccinimidyl succinate)), DMA (dimethyl adipimidate), DMP (dimethyl pimelimidate), DMS (dimethyl suberimidate), and DFDNB (1,5-difluoro-2,4-dinitrobenzene). Examples of other crosslinking agents include carboxyl/amine-reactive, sulfhydryl-reactive, aldehyde-reactive, and light-reactive crosslinking agents.

[0846] The non-covalent bond for linking the antigen-binding domains may be an ionic bond, hydrogen bond, or hydrophobic bond.

[0847] Whether the number of the bonds between the antigen-binding domains is larger than that of a control antigen-binding molecule (e.g., an antigen-binding molecule having a structure substantially similar to a naturally-occurring antibody structure) can be assessed by, for example, the following method. First, an antigen-binding molecule of interest and a control antigen-binding molecule are treated with a protease that cuts out the antigen-binding domain (for example, a protease that cleaves the N-terminal side of the crosslinkage site of the hinge regions such as papain and Lys-C), and then subjected to non-reducing electrophoresis. Next, an antibody that recognizes a part of the antigen-binding domain (for example, anti-kappa chain HRP-labelled antibody) is used to detect fragments which are present after the protease treatment. When only a monomer of the antigen-binding domain (for example, Fab monomer) is detected for the control antigen-binding molecule, and a multimer of the antigen-binding domain (for example, Fab dimer) is detected for the antigen-binding molecule of interest, then it can be assessed that the number of the bonds between the antigen-binding domains of the antigen-binding molecule of interest is larger than that of the control antigen-binding molecule.

[0848] The formation of a disulfide bond between cysteines in a modified antigen-binding molecule produced by introducing cysteines into a control antigen-binding molecule can be assessed by, for example, the following method. First, an antigen-binding molecule of interest is incubated with chymotrypsin in 20 mM phosphate buffer (pH7.0), and then the mass of peptides expected to be generated from the amino acid sequence of each antibody is detected by LC/MS. If a component corresponding to the theoretical mass of a peptide that should be generated when the newly-introduced cysteines form a disulfide bond is detected, the introduced cysteines can be assessed as having formed a disulfide bond. Moreover, if this component becomes undetectable when the sample containing the above-mentioned antigen-binding molecule is analyzed after adding an agent for reducing disulfide bonds (for example, tris(2-carboxyethyl)phosphine) to the sample, the correctness of the above assessment will be further strongly verified.

### <Resistance to Protease Cleavage>

[0849] In a non-limiting embodiment, the antigen-binding molecule of the present disclosure has resistance to protease cleavage. In certain embodiments, the resistance to protease cleavage of the antigen-binding molecule of the present disclosure is increased compared with a control antigen-binding molecule (for example, an antigen-binding molecule having a structure substantially similar to a naturally-occurring antibody structure) where the number of bonds between the antigen-binding domains is lesser by one or more compared to the antigen-binding molecule. In a further embodiment, the one less bond can be selected from bonds in which the amino acid residues from which the bonds between the antigen-binding domains originate are derived from mutated amino acid residues which are not present in a wild-type Fab or hinge region (for example, cysteine residues which are not present in the wild-type Fab or hinge region). If the proportion of the full-length molecule (for example, full-length IgG molecule) remaining after protease treatment is increased, or the proportion of a particular fragment (for example, Fab monomer) produced after protease treatment is reduced for an antigen-binding molecule compared to a control antigen-binding molecule, then it can be assessed that the resistance to protease cleavage is increased (protease resistance is improved).

[0850] In certain embodiments, the proportion of the full-length molecule remaining after protease treatment may be, relative to all antigen-binding molecules, for example, 0.5% or more, 1% or more, 1.5% or more, 2% or more, 2.5% or more, 3% or more, 3.5% or more, 4% or more, 4.5% or more, 5% or more, 7.5% or more, 10% or more, 12.5% or more, 15% or more, 20% or more, 25% or more, 30% or more, 35% or more, 40% or more, 45% or more, or 50% or more. In certain other embodiments, the proportion of a monomer of an antigen-binding domain (for example, Fab) produced after protease treatment may be, relative to all antigen-binding molecules, for example, 99% or less, 98% or less, 97% or less, 96% or less, 95% or less, 94% or less, 93% or less, 92% or less, 91% or less, 90% or less, 85% or less, 80% or less, 75% or less, 70% or less, 60% or less, 50% or less, 40% or less, 30% or less, 20% or less, or 10% or less. In certain other embodiments, the proportion of a dimer of an antigen-binding domain (for example, Fab) produced after protease treatment may be, relative to all antigen-binding molecules, for example, 0.5% or more, 1% or more, 1.5% or more, 2% or more, 2.5% or more, 3% or more, 3.5% or more, 4% or more, 4.5% or more, 5% or more, 7.5% or more, 10% or more, 12.5% or more, 15% or more, 20% or more, 25% or more, 30% or more, 35% or more, 40% or more, 45% or more, or 50% or more.

[0851] Examples of proteases include, but are not limited to, Lys-C, plasmin, human neutrophil elastase (HNE), and papain.

[0852] In a further aspect, an antigen-binding molecule according to any of the above embodiments may incorporate any of the features, singly or in combination, as described in Sections 1-7 below:

### 1. Antigen-Binding Molecule Affinity

[0853] In certain embodiments, an antigen-binding molecule provided herein has a dissociation constant (KD) of 1 micro M or less, 100 nM or less, 10 nM or less, 1 nM or less, 0.1 nM or less, 0.01 nM or less, or 0.001 nM or less (e.g., 10-8 M or less, e.g., from 10-8 M to 10-13 M, e.g., from 10-9 M to 10-13 M).

### 2. Antibody Fragments

[0854] In certain embodiments, an antigen-binding molecule provided herein is an antibody fragment. Antibody fragments include, but are not limited to, Fab, Fab′, Fab′-SH, F(ab′)₂, Fv, and scFv fragments, and other fragments described herein. For a review of certain antibody fragments, see Hudson et al. Nat. Med. 9:129-134 (2003). For a review of scFv fragments, see, e.g., Pluckthun, in The Pharmacology of Monoclonal Antibodies, vol. 113, Rosenburg and Moore eds., (Springer-Verlag, New York), pp. 269-315 (1994); see also WO 93/16185; and U.S. Pat. Nos. 5,571,894 and 5,587,458. For discussion of Fab and F(ab′)₂ fragments comprising salvage receptor binding epitope residues and having increased in vivo half-life, see U.S. Pat. No. 5,869,046.

[0855] Diabodies are antibody fragments with two antigen-binding sites that may be bivalent or bispecific. See, for example, EP 404,097; WO 1993/01161; Hudson et al., Nat. Med. 9:129-134 (2003); and Hollinger et al., Proc. Natl. Acad. Sci. USA 90: 6444-6448 (1993). Triabodies and tetrabodies are also described in Hudson et al., Nat. Med. 9:129-134 (2003).

### 3. Chimeric and Humanized Antibodies

[0856] In certain embodiments, an antigen-binding molecule provided herein is a chimeric antibody. Certain chimeric antibodies are described, e.g., in U.S. Pat. No. 4,816,567; and Morrison et al., Proc. Natl. Acad. Sci. USA, 81:6851-6855 (1984)). In one example, a chimeric antibody comprises a non-human variable region (e.g., a variable region derived from a mouse, rat, hamster, rabbit, or non-human primate, such as a monkey) and a human constant region. In a further example, a chimeric antibody is a “class switched” antibody in which the class or subclass has been changed from that of the parent antibody. Chimeric antibodies include antigen-binding fragments thereof.

[0857] In certain embodiments, a chimeric antibody is a humanized antibody. Typically, a non-human antibody is humanized to reduce immunogenicity to humans, while retaining the specificity and affinity of the parental non-human antibody. Generally, a humanized antibody comprises one or more variable domains in which HVRs, e.g., CDRs, (or portions thereof) are derived from a non-human antibody, and FRs (or portions thereof) are derived from human antibody sequences. A humanized antibody optionally will also comprise at least a portion of a human constant region. In some embodiments, some FR residues in a humanized antibody are substituted with corresponding residues from a non-human antibody (e.g., the antibody from which the HVR residues are derived), e.g., to restore or improve antibody specificity or affinity.

### 4. Human Antibodies

[0858] In certain embodiments, an antigen-binding molecule provided herein is a human antibody. Human antibodies can be produced using various techniques known in the art. Human antibodies are described generally in van Dijk and van de Winkel, Curr. Opin. Pharmacol. 5: 368-74 (2001) and Lonberg, Curr. Opin. Immunol. 20:450-459 (2008).

### 5. Library-Derived Antigen-Binding Molecules

[0859] Antigen-binding molecules of the invention may be isolated by screening combinatorial libraries for antigen-binding molecules with the desired activity or activities. For example, a variety of methods are known in the art for generating phage display libraries and screening such libraries for antigen-binding molecules possessing the desired binding characteristics. Such methods are reviewed, e.g., in Hoogenboom et al. in Methods in Molecular Biology 178:1-37 (O'Brien et al., ed., Human Press, Totowa, N J, 2001) and further described, e.g., in the McCafferty et al., Nature 348:552-554; Clackson et al., Nature 352: 624-628 (1991); Marks et al., J. Mol. Biol. 222: 581-597 (1992); Marks and Bradbury, in Methods in Molecular Biology 248:161-175 (Lo, ed., Human Press, Totowa, N J, 2003); Sidhu et al., J. Mol. Biol. 338(2): 299-310 (2004); Lee et al., J. Mol. Biol. 340(5): 1073-1093 (2004); Fellouse, Proc. Natl. Acad. Sci. USA 101(34): 12467-12472 (2004); and Lee et al., J. Immunol. Methods 284(1-2): 119-132(2004).

### 6. Multispecific Antigen-Binding Molecules

[0860] In certain embodiments, an antigen-binding molecule provided herein is a multispecific antigen-binding molecule, e.g. a bispecific antigen-binding molecule. Multispecific antigen-binding molecules are monoclonal antigen-binding molecules that have binding specificities for at least two different sites. In certain embodiments, one of the binding specificities is for a particular antigen (e.g., CD3) and the other is for any other antigen (e.g., CD28 or cancer antigen). In certain embodiments, bispecific antigen-binding molecules may bind to two different epitopes on a single antigen. Bispecific antigen-binding molecules can be prepared as full-length antibodies or antibody fragments.

[0861] Techniques for making multispecific antigen-binding molecules include, but are not limited to, recombinant co-expression of two immunoglobulin heavy chain-light chain pairs having different specificities (see Milstein and Cuello, Nature 305: 537 (1983)), WO 93/08829, and Traunecker et al., EMBO J. 10: 3655 (1991)), and “knob-in-hole” (also called “knobs-in-holes” or “KiH”) engineering (see, e.g., U.S. Pat. No. 5,731,168). Multi-specific antigen-binding molecules may also be made by engineering electrostatic steering effects for making antibody Fc-heterodimeric molecules (WO 2009/089004A1); cross-linking two or more antibodies or fragments (see, e.g., U.S. Pat. No. 4,676,980, and Brennan et al., Science, 229: 81 (1985)); using leucine zippers to produce bi-specific antibodies (see, e.g., Kostelny et al., J. Immunol., 148(5):1547-1553 (1992)); using “diabody” technology for making bispecific antibody fragments (see, e.g., Hollinger et al., Proc. Natl. Acad. Sci. USA, 90:6444-6448 (1993)); and using single-chain Fv (scFv) dimers (see, e.g. Gruber et al., J. Immunol., 152:5368 (1994)); and preparing trispecific antibodies as described, e.g., in Tutt et al. J. Immunol. 147: 60 (1991).

[0862] Engineered antibodies with three or more functional antigen binding sites, including “Octopus antibodies,” are also included herein (see, e.g. US 2006/0025576A1).

### 7. Antigen-Binding Molecule Variants

[0863] In certain embodiments, amino acid sequence variants of the antigen-binding molecules provided herein are contemplated. For example, it may be desirable to improve the binding affinity and/or other biological properties of the antigen-binding molecule. Amino acid sequence variants of an antigen-binding molecule may be prepared by introducing appropriate modifications into the nucleotide sequence encoding the antigen-binding molecule, or by peptide synthesis. Such modifications include, for example, deletions from, and/or insertions into and/or substitutions of residues within the amino acid sequences of the antigen-binding molecule. Any combination of deletion, insertion, and substitution can be made to arrive at the final construct, provided that the final construct possesses the desired characteristics, e.g., antigen-binding.

### a) Substitution, Insertion, and Deletion Variants

[0864] In certain embodiments, antigen-binding molecule variants having one or more amino acid substitutions are provided. Sites of interest for substitutional mutagenesis include the HVRs and FRs. Conservative substitutions are shown the table below under the heading of “preferred substitutions.” More substantial changes are provided in the table under the heading of “exemplary substitutions,” and as further described below in reference to amino acid side chain classes. Amino acid substitutions may be introduced into an antigen-binding molecule of interest and the products screened for a desired activity, e.g., retained/improved antigen binding, decreased immunogenicity, or improved ADCC or CDC.

| Original | Exemplary | Preferred |
|---|---|---|
| Residue | Substitutions | Substitutions |
| Ala (A) | Val; Leu; Ile | Val |
| Arg (R) | Lys; Gln; Asn | Lys |
| Asn (N) | Gln; His; Asp, Lys; Arg | Gln |
| Asp (D) | Glu; Asn | Glu |
| Cys (C) | Ser; Ala | Ser |
| Gln (Q) | Asn; Glu | Asn |
| Glu (E) | Asp; Gln | Asp |
| Gly (G) | Ala | Ala |
| His (H) | Asn; Gln; Lys; Arg | Arg |
| Ile (I) | Leu; Val; Met; Ala; Phe; Norleucine | Leu |
| Leu (L) | Norleucine; Ile; Val; Met; Ala; Phe | Ile |
| Lys (K) | Arg; Gln; Asn | Arg |
| Met (M) | Leu; Phe; Ile | Leu |
| Phe (F) | Trp; Leu; Val; Ile; Ala; Tyr | Tyr |
| Pro (P) | Ala | Ala |
| Ser (S) | Thr | Thr |
| Thr (T) | Val; Ser | Ser |
| Trp (W) | Tyr; Phe | Tyr |
| Tyr (Y) | Trp; Phe; Thr; Ser | Phe |
| Val (V) | Ile; Leu; Met; Phe; Ala; Norleucine | Leu |

[0865] Amino acids may be grouped according to common side-chain properties:
[0866] (1) hydrophobic: Norleucine, Met, Ala, Val, Leu, Ile;
[0867] (2) neutral hydrophilic: Cys, Ser, Thr, Asn, Gln;
[0868] (3) acidic: Asp, Glu;
[0869] (4) basic: His, Lys, Arg;
[0870] (5) residues that influence chain orientation: Gly, Pro;
[0871] (6) aromatic: Trp, Tyr, Phe.

[0872] Non-conservative substitutions will entail exchanging a member of one of these classes for another class.

[0873] One type of substitutional variant involves substituting one or more hypervariable region residues of a parent antigen-binding molecule (e.g. a humanized or human antibody). Generally, the resulting variant(s) selected for further study will have modifications (e.g., improvements) in certain biological properties (e.g., increased affinity, reduced immunogenicity) relative to the parent antigen-binding molecule and/or will have substantially retained certain biological properties of the parent antigen-binding molecule. An exemplary substitutional variant is an affinity matured antibody, which may be conveniently generated, e.g., using phage display-based affinity maturation techniques such as those described herein. Briefly, one or more HVR residues are mutated and the variant antibodies displayed on phage and screened for a particular biological activity (e.g. binding affinity).

[0874] Alterations (e.g., substitutions) may be made in HVRs, e.g., to improve antigen-binding molecule affinity. Such alterations may be made in HVR “hotspots,” i.e., residues encoded by codons that undergo mutation at high frequency during the somatic maturation process (see, e.g., Chowdhury, Methods Mol. Biol. 207:179-196 (2008)), and/or residues that contact antigen, with the resulting variant VH or VL being tested for binding affinity. Affinity maturation by constructing and reselecting from secondary libraries has been described, e.g., in Hoogenboom et al. in Methods in Molecular Biology 178:1-37 (O'Brien et al., ed., Human Press, Totowa, NJ, (2001).) In some embodiments of affinity maturation, diversity is introduced into the variable genes chosen for maturation by any of a variety of methods (e.g., error-prone PCR, chain shuffling, or oligonucleotide-directed mutagenesis). A secondary library is then created. The library is then screened to identify any antigen-binding molecule variants with the desired affinity. Another method to introduce diversity involves HVR-directed approaches, in which several HVR residues (e.g., 4-6 residues at a time) are randomized. HVR residues involved in antigen binding may be specifically identified, e.g., using alanine scanning mutagenesis or modeling. CDR-H3 and CDR-L3 in particular are often targeted.

[0875] In certain embodiments, substitutions, insertions, or deletions may occur within one or more HVRs so long as such alterations do not substantially reduce the ability of the antigen-binding molecule to bind antigen. For example, conservative alterations (e.g., conservative substitutions as provided herein) that do not substantially reduce binding affinity may be made in HVRs. Such alterations may, for example, be outside of antigen contacting residues in the HVRs. In certain embodiments of the variant VH and VL sequences provided above, each HVR either is unaltered, or contains no more than one, two or three amino acid substitutions.

[0876] A useful method for identification of residues or regions of an antigen-binding molecule that may be targeted for mutagenesis is called “alanine scanning mutagenesis” as described by Cunningham and Wells (1989) Science, 244:1081-1085. In this method, a residue or group of target residues (e.g., charged residues such as arg, asp, his, lys, and glu) are identified and replaced by a neutral or negatively charged amino acid (e.g., alanine or polyalanine) to determine whether the interaction of the antigen-binding molecule with antigen is affected. Further substitutions may be introduced at the amino acid locations demonstrating functional sensitivity to the initial substitutions. Alternatively, or additionally, a crystal structure of a complex of antigens and an antigen-binding molecule may be analyzed to identify contact points between the antigen-binding molecule and antigen. Such contact residues and neighboring residues may be targeted or eliminated as candidates for substitution. Variants may be screened to determine whether they contain the desired properties.

[0877] Amino acid sequence insertions include amino- and/or carboxyl-terminal fusions ranging in length from one residue to polypeptides containing a hundred or more residues, as well as intrasequence insertions of single or multiple amino acid residues. Examples of terminal insertions include an antigen-binding molecule with an N-terminal methionyl residue. Other insertional variants of the antigen-binding molecule include the fusion of an enzyme (e.g. for ADEPT) or a polypeptide which increases the plasma half-life of the antigen-binding molecule to the N- or C-terminus of the antigen-binding molecule.

### b) Glycosylation Variants

[0878] In certain embodiments, an antigen-binding molecule provided herein is altered to increase or decrease the extent to which the antigen-binding molecule is glycosylated. Addition or deletion of glycosylation sites to an antigen-binding molecule may be conveniently accomplished by altering the amino acid sequence such that one or more glycosylation sites is created or removed.

[0879] Where the antigen-binding molecule comprises an Fc region, the carbohydrate attached thereto may be altered. Native antibodies produced by mammalian cells typically comprise a branched, biantennary oligosaccharide that is generally attached by an N-linkage to Asn297 of the CH2 domain of the Fc region. See, e.g., Wright et al. TIBTECH 15:26-32 (1997). The oligosaccharide may include various carbohydrates, e.g., mannose, N-acetyl glucosamine (GlcNAc), galactose, and sialic acid, as well as a fucose attached to a GlcNAc in the “stem” of the biantennary oligosaccharide structure. In some embodiments, modifications of the oligosaccharide in an antigen-binding molecule of the invention may be made in order to create antigen-binding molecule variants with certain improved properties.

[0880] In one embodiment, antigen-binding molecule variants are provided having a carbohydrate structure that lacks fucose attached (directly or indirectly) to an Fc region. For example, the amount of fucose in such antigen-binding molecule may be from 1% to 80%, from 1% to 65%, from 5% to 65% or from 20% to 40%. The amount of fucose is determined by calculating the average amount of fucose within the sugar chain at Asn297, relative to the sum of all glycostructures attached to Asn 297 (e. g. complex, hybrid and high mannose structures) as measured by MALDI-TOF mass spectrometry, as described in WO 2008/077546, for example. Asn297 refers to the asparagine residue located at about position 297 in the Fc region (EU numbering of Fc region residues); however, Asn297 may also be located about +/−3 amino acids upstream or downstream of position 297, i.e., between positions 294 and 300, due to minor sequence variations in antigen-binding molecules. Such fucosylation variants may have improved ADCC function. See, e.g., US Patent Publication Nos. US 2003/0157108 (Presta, L.); US 2004/0093621 (Kyowa Hakko Kogyo Co., Ltd). Examples of publications related to “defucosylated” or “fucose-deficient” antigen-binding molecule variants include: US 2003/0157108; WO 2000/61739; WO 2001/29246; US 2003/0115614; US 2002/0164328; US 2004/0093621; US 2004/0132140; US 2004/0110704; US 2004/0110282; US 2004/0109865; WO 2003/085119; WO 2003/084570; WO 2005/035586; WO 2005/035778; WO2005/053742; WO2002/031140; Okazaki et al. J. Mol. Biol. 336:1239-1249 (2004); Yamane-Ohnuki et al. Biotech. Bioeng. 87: 614 (2004). Examples of cell lines capable of producing defucosylated antigen-binding molecules include Lec13 CHO cells deficient in protein fucosylation (Ripka et al. Arch. Biochem. Biophys. 249:533-545 (1986); US Pat Appl No US 2003/0157108 A1, Presta, L; and WO 2004/056312 A1, Adams et al., especially at Example 11), and knockout cell lines, such as alpha-1,6-fucosyltransferase gene, FUT8, knockout CHO cells (see, e.g., Yamane-Ohnuki et al. Biotech. Bioeng. 87: 614 (2004); Kanda, Y. et al., Biotechnol. Bioeng., 94(4):680-688 (2006); and WO2003/085107).

[0881] Antigen-binding molecule variants are further provided with bisected oligosaccharides, e.g., in which a biantennary oligosaccharide attached to the Fc region of the antigen-binding molecule is bisected by GlcNAc. Such antigen-binding molecule variants may have reduced fucosylation and/or improved ADCC function. Examples of such antibody variants are described, e.g., in WO 2003/011878 (Jean-Mairet et al.); U.S. Pat. No. 6,602,684 (Umana et al.); and US 2005/0123546 (Umana et al.). Antigen-binding molecule variants with at least one galactose residue in the oligosaccharide attached to the Fc region are also provided. Such antigen-binding molecule variants may have improved CDC function. Such antigen-binding molecule variants are described, e.g., in WO 1997/30087 (Patel et al.); WO 1998/58964 (Raju, S.); and WO 1999/22764 (Raju, S.).

### c) Fc Region Variants

[0882] In certain embodiments, one or more amino acid modifications may be introduced into the Fc region of an antigen-binding molecule provided herein, thereby generating an Fc region variant. The Fc region variant may comprise a human Fc region sequence (e.g., a human IgG1, IgG2, IgG3 or IgG4 Fc region) comprising an amino acid modification (e.g. a substitution) at one or more amino acid positions.

[0883] In certain embodiments, the invention contemplates an antigen-binding molecule variant that possesses some but not all effector functions, which make it a desirable candidate for applications in which the half life of the antigen-binding molecule in vivo is important yet certain effector functions (such as complement and ADCC) are unnecessary or deleterious. In vitro and/or in vivo cytotoxicity assays can be conducted to confirm the reduction/depletion of CDC and/or ADCC activities. For example, Fc receptor (FcR) binding assays can be conducted to ensure that the antigen-binding molecule lacks Fc gamma R binding (hence likely lacking ADCC activity), but retains FcRn binding ability. The primary cells for mediating ADCC, NK cells, express Fc gamma RIII only, whereas monocytes express Fc gamma RI, Fc gamma RII and Fc gamma RIII. FcR expression on hematopoietic cells is summarized in Table 3 on page 464 of Ravetch and Kinet, Annu. Rev. Immunol. 9:457-492 (1991). Non-limiting examples of in vitro assays to assess ADCC activity of a molecule of interest is described in U.S. Pat. No. 5,500,362 (see, e.g. Hellstrom, I. et al. Proc. Nat'l Acad. Sci. USA 83:7059-7063 (1986)) and Hellstrom, I et al., Proc. Nat'l Acad. Sci. USA 82:1499-1502 (1985); 5,821,337 (see Bruggemann, M. et al., J. Exp. Med. 166:1351-1361 (1987)). Alternatively, non-radioactive assays methods may be employed (see, for example, ACT1™ non-radioactive cytotoxicity assay for flow cytometry (CellTechnology, Inc. Mountain View, CA; and CytoTox 96 (registered trademark) non-radioactive cytotoxicity assay (Promega, Madison, WI). Useful effector cells for such assays include peripheral blood mononuclear cells (PBMC) and Natural Killer (NK) cells. Alternatively, or additionally, ADCC activity of the molecule of interest may be assessed in vivo, e.g., in an animal model such as that disclosed in Clynes et al. Proc. Nat'l Acad. Sci. USA 95:652-656 (1998). C1q binding assays may also be carried out to confirm that the antigen-binding molecule is unable to bind C1q and hence lacks CDC activity. See, e.g., C1q and C3c binding ELISA in WO 2006/029879 and WO 2005/100402. To assess complement activation, a CDC assay may be performed (see, for example, Gazzano-Santoro et al., J. Immunol. Methods 202:163 (1996); Cragg, M. S. et al., Blood 101:1045-1052 (2003); and Cragg, M. S. and M. J. Glennie, Blood 103:2738-2743 (2004)). FcRn binding and in vivo clearance/half life determinations can also be performed using methods known in the art (see, e.g., Petkova, S. B. et al., Int'l. Immunol. 18(12):1759-1769 (2006)).

[0884] Antigen-binding molecules with reduced effector function include those with substitution of one or more of Fc region residues 238, 265, 269, 270, 297, 327 and 329 (U.S. Pat. No. 6,737,056). Such Fc mutants include Fc mutants with substitutions at two or more of amino acid positions 265, 269, 270, 297 and 327, including the so-called “DANA” Fc mutant with substitution of residues 265 and 297 to alanine (U.S. Pat. No. 7,332,581).

[0885] Certain antigen-binding molecule variants with increased or decreased binding to FcRs are described. (See, e.g., U.S. Pat. No. 6,737,056; WO 2004/056312, and Shields et al., J. Biol. Chem. 9(2): 6591-6604 (2001).)

[0886] In certain embodiments, an antigen-binding molecule variant comprises an Fc region with one or more amino acid substitutions which improve ADCC, e.g., substitutions at positions 298, 333, and/or 334 of the Fc region (EU numbering of residues).

[0887] In some embodiments, alterations are made in the Fc region that result in altered (i.e., either increased or decreased) C1q binding and/or Complement Dependent Cytotoxicity (CDC), e.g., as described in U.S. Pat. No. 6,194,551, WO 99/51642, and Idusogie et al. J. Immunol. 164: 4178-4184 (2000).

[0888] Antibodies with increased half lives and increased binding to the neonatal Fc receptor (FcRn), which is responsible for the transfer of maternal IgGs to the fetus (Guyer et al., J. Immunol. 117:587 (1976) and Kim et al., J. Immunol. 24:249 (1994)), are described in US2005/0014934A1 (Hinton et al.). Those antibodies comprise an Fc region with one or more substitutions therein which increase binding of the Fc region to FcRn. Such Fc variants include those with substitutions at one or more of Fc region residues: 238, 256, 265, 272, 286, 303, 305, 307, 311, 312, 317, 340, 356, 360, 362, 376, 378, 380, 382, 413, 424 or 434, e.g., substitution of Fc region residue 434 (U.S. Pat. No. 7,371,826).

[0889] See also Duncan & Winter, Nature 322:738-40 (1988); U.S. Pat. Nos. 5,648,260; 5,624,821; and WO 94/29351 concerning other examples of Fc region variants.

### d) Cysteine Engineered Antigen-Binding Molecule Variants

[0890] In certain embodiments, it may be desirable to create cysteine engineered antigen-binding molecules, e.g., “thioMAbs,” in which one or more residues of an antigen-binding molecule are substituted with cysteine residues. In particular embodiments, the substituted residues occur at accessible sites of the antigen-binding molecule. By substituting those residues with cysteine, reactive thiol groups are thereby positioned at accessible sites of the antigen-binding molecule and may be used to conjugate the antigen-binding molecule to other moieties, such as drug moieties or linker-drug moieties, to create an immunoconjugate, as described further herein. In certain embodiments, any one or more of the following residues may be substituted with cysteine: V205 (Kabat numbering) of the light chain; A118 (EU numbering) of the heavy chain; and S400 (EU numbering) of the heavy chain Fc region. Cysteine engineered antigen-binding molecules may be generated as described, e.g., in U.S. Pat. No. 7,521,541.

### e) Antigen-Binding Molecule Derivatives

[0891] In certain embodiments, an antigen-binding molecule provided herein may be further modified to contain additional nonproteinaceous moieties that are known in the art and readily available. The moieties suitable for derivatization of the antigen-binding molecule include but are not limited to water soluble polymers. Non-limiting examples of water soluble polymers include, but are not limited to, polyethylene glycol (PEG), copolymers of ethylene glycol/propylene glycol, carboxymethylcellulose, dextran, polyvinyl alcohol, polyvinyl pyrrolidone, poly-1, 3-dioxolane, poly-1,3,6-trioxane, ethylene/maleic anhydride copolymer, polyaminoacids (either homopolymers or random copolymers), and dextran or poly(n-vinyl pyrrolidone)polyethylene glycol, polypropylene glycol homopolymers, polypropylene oxide/ethylene oxide co-polymers, polyoxyethylated polyols (e.g., glycerol), polyvinyl alcohol, and mixtures thereof. Polyethylene glycol propionaldehyde may have advantages in manufacturing due to its stability in water. The polymer may be of any molecular weight, and may be branched or unbranched. The number of polymers attached to the antigen-binding molecule may vary, and if more than one polymer are attached, they can be the same or different molecules. In general, the number and/or type of polymers used for derivatization can be determined based on considerations including, but not limited to, the particular properties or functions of the antigen-binding molecule to be improved, whether the antigen-binding molecule derivative will be used in a therapy under defined conditions, etc.

[0892] In connection with an antigen-binding molecule in the present disclosure, examples of the desired property (activity) can include, but are not particularly limited to, binding activity, neutralizing activity, cytotoxic activity, agonist activity, antagonist activity, and enzymatic activity. The agonist activity is an activity of intracellularly transducing signals, for example, through the binding of an antibody to an antigen such as a receptor to induce change in some physiological activity. Examples of the physiological activity can include, but are not limited to, proliferative activity, survival activity, differentiation activity, transcriptional activity, membrane transport activity, binding activity, proteolytic activity, phosphorylating/dephosphorylating activity, redox activity, transfer activity, nucleolytic activity, dehydration activity, cell death-inducing activity, and apoptosis-inducing activity.

[0893] In another embodiment, conjugates of an antigen-binding molecule and nonproteinaceous moiety that may be selectively heated by exposure to radiation are provided. In one embodiment, the nonproteinaceous moiety is a carbon nanotube (Kam et al., Proc. Natl. Acad. Sci. USA 102: 11600-11605 (2005)). The radiation may be of any wavelength, and includes, but is not limited to, wavelengths that do not harm ordinary cells, but which heat the nonproteinaceous moiety to a temperature at which cells proximal to the antigen binding molecule-nonproteinaceous moiety are killed.

### B. Recombinant Methods and Compositions

[0894] Antigen-binding molecules may be produced using recombinant methods and compositions, e.g., as described in U.S. Pat. No. 4,816,567. In one embodiment, isolated nucleic acid encoding an antigen-binding molecule in the present disclosure (a polypeptide comprising an antigen-binding domain described herein) is provided. Such nucleic acid may encode an amino acid sequence comprising the VL and/or an amino acid sequence comprising the VH of the antigen-binding molecule (e.g., the light and/or heavy chains of the antigen-binding molecule). In a further embodiment, one or more vectors (e.g., expression vectors) comprising such nucleic acid are provided. In a further embodiment, a host cell comprising such nucleic acid is provided. In one such embodiment, a host cell comprises (e.g., has been transformed with): (1) a vector comprising a nucleic acid that encodes an amino acid sequence comprising the VL of the antigen-binding molecule and an amino acid sequence comprising the VH of the antigen-binding molecule, or (2) a first vector comprising a nucleic acid that encodes an amino acid sequence comprising the VL of the antigen-binding molecule and a second vector comprising a nucleic acid that encodes an amino acid sequence comprising the VH of the antigen-binding molecule. In one embodiment, the host cell is eukaryotic, e.g. a Chinese Hamster Ovary (CHO) cell or lymphoid cell (e.g., Y0, NS0, Sp2/0 cell). In one embodiment, a method of making an antigen-binding molecule in the present disclosure is provided, wherein the method comprises culturing a host cell comprising a nucleic acid encoding the antigen-binding molecule, as provided above, under conditions suitable for expression of the antigen-binding molecule, and optionally recovering the antigen-binding molecule from the host cell (or host cell culture medium).

[0895] For recombinant production of an antigen-binding molecule in the present disclosure, nucleic acid encoding an antigen-binding molecule, e.g., as described above, is isolated and inserted into one or more vectors for further cloning and/or expression in a host cell. Such nucleic acid may be readily isolated and sequenced using conventional procedures (e.g., by using oligonucleotide probes that are capable of binding specifically to genes encoding the heavy and light chains of the antigen-binding molecule).

[0896] Suitable host cells for cloning or expression of antigen-binding molecule-encoding vectors include prokaryotic or eukaryotic cells described herein. For example, antigen-binding molecules may be produced in bacteria, in particular when glycosylation and Fc effector function are not needed. For expression of antibody fragments and polypeptides in bacteria, see, e.g., U.S. Pat. Nos. 5,648,237, 5,789,199, and 5,840,523. (See also Charlton, Methods in Molecular Biology, Vol. 248 (B. K. C. Lo, ed., Humana Press, Totowa, N J, 2003), pp. 245-254, describing expression of antibody fragments in E. coli.) After expression, the antigen-binding molecule may be isolated from the bacterial cell paste in a soluble fraction and can be further purified.

[0897] In addition to prokaryotes, eukaryotic microbes such as filamentous fungi or yeast are suitable cloning or expression hosts for antigen-binding molecule-encoding vectors, including fungi and yeast strains whose glycosylation pathways have been “humanized,” resulting in the production of an antigen-binding molecule with a partially or fully human glycosylation pattern. See Gerngross, Nat. Biotech. 22:1409-1414 (2004), and Li et al., Nat. Biotech. 24:210-215 (2006).

[0898] Suitable host cells for the expression of glycosylated antigen-binding molecule are also derived from multicellular organisms (invertebrates and vertebrates). Examples of invertebrate cells include plant and insect cells. Numerous baculoviral strains have been identified which may be used in conjunction with insect cells, particularly for transfection of Spodoptera frugiperda cells.

[0899] Plant cell cultures can also be utilized as hosts. See, e.g., U.S. Pat. Nos. 5,959,177, 6,040,498, 6,420,548, 7,125,978, and 6,417,429 (describing PLANTIBODIES™ technology for producing antigen-binding molecules in transgenic plants).

[0900] Vertebrate cells may also be used as hosts. For example, mammalian cell lines that are adapted to grow in suspension may be useful. Other examples of useful mammalian host cell lines are monkey kidney CV1 line transformed by SV40 (COS-7); human embryonic kidney line (293 or 293 cells as described, e.g., in Graham et al., J. Gen Virol. 36:59 (1977)); baby hamster kidney cells (BHK); mouse sertoli cells (TM4 cells as described, e.g., in Mather, Biol. Reprod. 23:243-251 (1980)); monkey kidney cells (CV1); African green monkey kidney cells (VERO-76); human cervical carcinoma cells (HELA); canine kidney cells (MDCK); buffalo rat liver cells (BRL 3A); human lung cells (W138); human liver cells (Hep G2); mouse mammary tumor (MMT 060562); TRI cells, as described, e.g., in Mather et al., Annals N.Y. Acad. Sci. 383:44-68 (1982); MRC 5 cells; and FS4 cells. Other useful mammalian host cell lines include Chinese hamster ovary (CHO) cells, including DHFR-CHO cells (Urlaub et al., Proc. Natl. Acad. Sci. USA 77:4216 (1980)); and myeloma cell lines such as Y0, NS0 and Sp2/0. For a review of certain mammalian host cell lines suitable for antigen-binding molecule production, see, e.g., Yazaki and Wu, Methods in Molecular Biology, Vol. 248 (B. K. C. Lo, ed., Humana Press, Totowa, NJ), pp. 255-268 (2003).

### C. Assays

[0901] Antigen-binding molecules provided herein may be identified, screened for, or characterized for their physical/chemical properties and/or biological activities by various assays known in the art.

### 1. Binding Assays and Other Assays

[0902] In one aspect, an antigen-binding molecule in the present disclosure is tested for its antigen binding activity, e.g., by known methods such as ELISA, Western blot, etc.

### 2. Activity Assays

[0903] In one aspect, assays are provided for identifying antigen-binding molecules thereof having biological activity. Biological activity may include, e.g., activity of holding two antigen molecules at spatially close positions, activity of regulating interaction between two antigen molecules, activity of promoting activation of an receptor by a ligand, activity of promoting catalytic reaction of an enzyme with a substrate, promoting interaction between a cell expressing a first antigen and a cell expressing a second antigen, activity of promoting damage of a target cell by a cell with cytotoxic activity (e.g., a T cell, NK cell, monocyte, or macrophage), activity of regulating activation of two antigen molecules which are activated by association with each other, and resistance to protease cleavage. Antigen-binding molecules having such biological activity in vivo and/or in vitro are also provided.

[0904] Furthermore, an antigen-binding molecule in the present disclosure can exert various biological activities depending on the type of an antigen molecule to which the antigen-binding molecule binds. Examples of such antigen-binding molecules include an antigen-binding molecule which binds to a T cell receptor (TCR) complex (e.g., CD3) and has activity of inducing T cell activation (agonist activity); and an antigen-binding molecule which binds to a molecule of TNF receptor superfamily (e.g., OX40 or 4-1BB) or of other co-stimulatory molecules (e.g., CD28 or ICOS) and has activity of promoting the above-mentioned activation (agonist activity). In certain embodiments, such biological activity exerted through the binding to an antigen molecule is enhanced or diminished by the linking of two or more antigen-binding domains comprised in the antigen-binding molecule in the present disclosure. Without being limited by theory, in certain embodiments, such enhancement or diminishment may be achieved because the interaction between two or more antigen molecules is regulated through the binding to the antigen-binding molecule in the present disclosure (e.g., the association between two or more antigen molecules is promoted).

[0905] In certain embodiments, an antigen-binding molecule of the invention is tested for such biological activity. Whether two antigen molecules are held spatially close can be evaluated using techniques such as crystal structure analysis, electron microscopy, and electron tomography-based structural analysis of a complex composed of antigens and an antigen-binding molecule. Whether two antigen-binding domains are spatially close to each other or whether the mobility of two antigen-binding domains is reduced can also be evaluated by the above-mentioned techniques. In particular, as for techniques to analyze the three-dimensional structure of IgG molecules using electron tomography, see, for example, Zhang et al., Sci. Rep. 5:9803 (2015). In electron tomography, the frequency of occurrence of structures that a subject molecule may form can be shown by histograms, enabling distributional evaluation of structural changes such as reduced mobility of domains. For example, when the relationship between values that can be taken by structure-related parameters, such as distance and angle between two domains, and their frequency of occurrence is shown by histograms, one can determine that the mobility of the two domains is decreased if their areas of distribution are decreased. Activity exerted through interaction and such of two antigen molecules can be evaluated by selecting and using an appropriate activity measurement system from known ones according to the type of target antigen molecules. The effect on protease cleavage can be evaluated using methods known to those skilled in the art, or methods described in the Examples below.

### D. Pharmaceutical Formulations (Pharmaceutical Compositions)

[0906] Pharmaceutical formulations of an antigen-binding molecule as described herein are prepared by mixing such antigen-binding molecule having the desired degree of purity with one or more optional pharmaceutically acceptable carriers (Remington's Pharmaceutical Sciences 16th edition, Osol, A. Ed. (1980)), in the form of lyophilized formulations or aqueous solutions. Pharmaceutically acceptable carriers are generally nontoxic to recipients at the dosages and concentrations employed, and include, but are not limited to: buffers such as phosphate, citrate, and other organic acids; antioxidants including ascorbic acid and methionine; preservatives (such as octadecyldimethylbenzyl ammonium chloride; hexamethonium chloride; benzalkonium chloride; benzethonium chloride; phenol, butyl or benzyl alcohol; alkyl parabens such as methyl or propyl paraben; catechol; resorcinol; cyclohexanol; 3-pentanol; and m-cresol); low molecular weight (less than about 10 residues) polypeptides; proteins, such as serum albumin, gelatin, or immunoglobulins; hydrophilic polymers such as polyvinylpyrrolidone; amino acids such as glycine, glutamine, asparagine, histidine, arginine, or lysine; monosaccharides, disaccharides, and other carbohydrates including glucose, mannose, or dextrins; chelating agents such as EDTA; sugars such as sucrose, mannitol, trehalose or sorbitol; salt-forming counter-ions such as sodium; metal complexes (e.g. Zn-protein complexes); and/or non-ionic surfactants such as polyethylene glycol (PEG). Exemplary pharmaceutically acceptable carriers herein further include interstitial drug dispersion agents such as soluble neutral-active hyaluronidase glycoproteins (sHASEGP), for example, human soluble PH-20 hyaluronidase glycoproteins, such as rHuPH20 (HYLENEX (registered trademark), Baxter International, Inc.). Certain exemplary sHASEGPs and methods of use, including rHuPH20, are described in US Patent Publication Nos. 2005/0260186 and 2006/0104968. In one aspect, a sHASEGP is combined with one or more additional glycosaminoglycanases such as chondroitinases.

[0907] Exemplary lyophilized antigen-binding molecule formulations are described in U.S. Pat. No. 6,267,958. Aqueous antigen-binding molecule formulations include those described in U.S. Pat. No. 6,171,586 and WO2006/044908, the latter formulations including a histidine-acetate buffer.

[0908] The formulation herein may also contain more than one active ingredients as necessary for the particular indication being treated, preferably those with complementary activities that do not adversely affect each other. Such active ingredients are suitably present in combination in amounts that are effective for the purpose intended.

[0909] Active ingredients may be entrapped in microcapsules prepared, for example, by coacervation techniques or by interfacial polymerization, for example, hydroxymethylcellulose or gelatin-microcapsules and poly-(methylmethacrylate) microcapsules, respectively, in colloidal drug delivery systems (for example, liposomes, albumin microspheres, microemulsions, nano-particles and nanocapsules) or in macroemulsions. Such techniques are disclosed in Remington's Pharmaceutical Sciences 16th edition, Osol, A. Ed. (1980).

[0910] Sustained-release preparations may be prepared. Suitable examples of sustained-release preparations include semipermeable matrices of solid hydrophobic polymers containing the antigen-binding molecule, which matrices are in the form of shaped articles, e.g. films, or microcapsules.

[0911] The formulations to be used for in vivo administration are generally sterile. Sterility may be readily accomplished, e.g., by filtration through sterile filtration membranes.

### EXAMPLES

[0912] The following are examples of antigen-binding molecules and methods of the present disclosure. It will be understood that various other embodiments may be practiced, given the general description provided above.

### Example 1

[0913] Optimizing Methods for Producing, Purification and Assessment of Antibodies Having One or More Disulfide Bonds within Fab Region

[0914] Preparation and assessment of antibodies having a single pair of cysteine substitution at various positions in the antibodies were described in Reference Examples 1-25. Based on the results of non-reducing SDS-PAGE (Reference Examples 8-2, 9-2, 10-2, and 11-2; see also FIGS. 1 to 4), it was found that some of the preparation of antibody having cysteine substitution comprises two or more structural variants/isoforms which differ in electrophoretic mobility, i.e. Double, Triple or Several bands as observed from the non-reducing SDS-PAGE gel images. For example, two bands were observed in the G1T4.S191C-IgG1 variant (cysteine substitution at the position 191 of the CH1 region) with about 66.3% percentage of the new band (corresponds to antibody preparation having one disulfide bond formed between two Fabs at position 191 of the CH1 region) relative to the band corresponding to that of the parent antibody. The results suggest that the antibody preparation of the G1T4.S191C-IgG1 variant comprises two or more structural isoforms which differ by one disulfide bond formed between the engineered cysteines, in particular isoform having the “paired cysteines” or isoform having the “free or unpaired cysteines”, can be generated during recombinant antibody production.

[0915] As described in further detail hereinbelow, the following non-limiting examples are directed to providing efficient and facile production, purification and analysis of the antibody having an engineered disulfide bond formed between the two Fabs of the antibody; methods for increasing structural homogeneity and relative abundance of the antibody in the “paired cysteines” form, i.e. having one or more engineered disulfide bond(s) formed between the two Fabs of the antibody; or methods for decreasing relative abundance of the antibody in the “free or unpaired cysteines” form, i.e. having no engineered disulfide bond formed between the two Fabs of the antibody.

### Example 1-1 Production of Antibodies Having Multiple Additional Disulfide Bonds within the Fab Region

[0916] To improve the percentage of antibody preparation of G1T4.S191C-IgG1 variant having an engineered disulfide bond formed at the position 191 of CH1 region of the antibody, additional one or two disulfide bonds were introduced into the heavy chain of an anti-human CD3 antibody, OKT3 (heavy chain: OKT3VH0000-G1T4 (SEQ ID NO: 1242), light chain: OKT3VL0000-KT0 (SEQ ID NO: 1243)) via cysteine substitution.

[0917] An amino acid residue structurally exposed to the surface of the OKT3 heavy chain constant region (G1T4, SEQ ID NO: 1244) was substituted with cysteine to produce the variant of OKT3 heavy chain constant region (G1T4.S191C, SEQ ID NO: 1245) shown in Table 1. In addition, other amino acid residues structurally exposed to the surface of G1T4.S191C were substituted with cysteine to produce the variants of G1T4.S191C shown in Table 2. These heavy chain constant regions were each linked with the OKT3 heavy chain variable region (OKT3VH0000, SEQ ID NO: 1246) to produce the OKT3 heavy chain variants, and expression vectors encoding the corresponding genes were produced by a method known in the art.

[0918] Similarly, amino acid residues structurally exposed to the surface of the OKT3 heavy chain constant region 1 (G1T4k, SEQ ID NO: 1263) and constant region 2 (G1T4h, SEQ ID NO: 1264) were substituted with cysteine to produce the variant of OKT3 heavy chain constant regions shown in Table 3, respectively. In addition, other amino acid residues structurally exposed to the surface of the variants shown in Table 3 were substituted with cysteine to produce the variants shown in Table 4. These heavy chain constant regions were each linked with the OKT3 heavy chain variable region (OKT3VH0000, SEQ ID NO: 1246) to produce the OKT3 heavy chain variants, and expression vectors encoding the corresponding genes were produced by a method known in the art. It is noted that the Knobs-into-Holes (KiH) mutations in the CH3 region are introduced into the heavy-chain constant regions 1 and 2 in this Example for promoting heterodimerization.

[0919] The OKT3 heavy chain variants produced as mentioned above were combined with the OKT3 light chain. The OKT3 variants shown in Table 5 and 6 were expressed by transient expression using Expi293 cells (Life technologies) by a method known to the person skilled in the art, and purified with Protein A by a method known to the person skilled in the art. In this Example, OKT3 and OKT3-KiH are called “parent antibodies”, OKT3.S191C and OKT3-KiH.S191C are called “S191C variants”, and their variants are called “additional variants”, respectively.

TABLE 1
G1T4 variant with single cysteine substitution

| | Position of cysteine | |
|---|---|---|
| Variant of heavy chain | substitution | SEQ |
| constant region | (EU numbering) | ID NO: |
| G1T4.S191C | 191 | 1245 |

TABLE 2
G1T4.S191C variants with additional cysteine substitution

| | Position of cysteine | |
|---|---|---|
| Variants of heavy chain | substitution | SEQ |
| constant region | (EU numbering) | ID NO: |
| G1T4.S191C.S131C.G194C | S131C/G194C | 1247 |
| G1T4.S191C.S132C.G194C | S132C/G194C | 1248 |
| G1T4.S191C.K133C.G194C | K133C/G194C | 1249 |
| G1T4.S191C.S134C.G194C | S134C/G194C | 1250 |
| G1T4.S191C.T135C.G194C | T135C/G194C | 1251 |
| G1T4.S191C.S136C.G194C | S136C/G194C | 1252 |
| G1T4.S191C.G137C.G194C | G137C/G194C | 1253 |
| G1T4.S191C.G138C.G194C | G138C/G194C | 1254 |
| G1T4.S191C.S131C.T195C | S131C/T195C | 1255 |
| G1T4.S191C.S132C.T195C | S132C/T195C | 1256 |
| G1T4.S191C.K133C.T195C | K133C/T195C | 1257 |
| G1T4.S191C.S134C.T195C | S134C/T195C | 1258 |
| G1T4.S191C.T135C.T195C | T135C/T195C | 1259 |
| G1T4.S191C.S136C.T195C | S136C/T195C | 1260 |
| G1T4.S191C.G137C.T195C | G137C/T195C | 1261 |
| G1T4.S191C.G138C.T195C | G138C/T195C | 1262 |

TABLE 3
G1T4k and G1T4h variants with single cysteine substitution

| | Position of cysteine | |
|---|---|---|
| Variants of heavy chain | substitution | SEQ |
| constant region | (EU numbering) | ID NO: |
| G1T4k.S191C | S191C | 1265 |
| G1T4h.S191C | S191C | 1266 |

TABLE 4
G1T4k.S191C and G1T4h.S191C variants
with additional cysteine substitution

| | Position of cysteine | |
|---|---|---|
| Variants of heavy chain | substitution | SEQ |
| constant region | (EU numbering) | ID NO: |
| G1T4k.S191C.S131C | S131C | 1267 |
| G1T4k.S191C.S132C | S132C | 1268 |
| G1T4k.S191C.K133C | K133C | 1269 |
| G1T4k.S191C.S134C | S134C | 1270 |
| G1T4k.S191C.T135C | T135C | 1271 |
| G1T4k.S191C.S136C | S136C | 1272 |
| G1T4k.S191C.G137C | G137C | 1273 |
| G1T4k.S191C.G138C | G138C | 1274 |
| G1T4k.S191C.S131C | S131C | 1275 |
| G1T4k.S191C.S132C | S132C | 1276 |
| G1T4k.S191C.K133C | K133C | 1277 |
| G1T4k.S191C.S134C | S134C | 1278 |
| G1T4k.S191C.T135C | T135C | 1279 |
| G1T4k.S191C.S136C | S136C | 1280 |
| G1T4k.S191C.G137C | G137C | 1281 |
| G1T4k.S191C.G138C | G138C | 1282 |
| G1T4h.S191C.G194C | G194C | 1283 |
| G1T4h.S191C.T195C | T195C | 1284 |

TABLE 5
OKT3 variants with cysteine substitution

| | | Heavy | Heavy | |
|---|---|---|---|---|
| | | chain | chain | |
| | | variable | constant | Light |
| | | region | region | chain |
| Name of OKT3 | Short | SEQ | SEQ | SEQ |
| variants | Name | ID NO: | ID NO: | ID NO: |
| OKT3 | OKT3 | 1246 | 1244 | 1243 |
| OKT3.S191C | OKT3.S191C | 1246 | 1245 | 1243 |
| OKT3.S191C.S131C.G194C | OKT3.S191C_v1 | 1246 | 1247 | 1243 |
| OKT3.S191C.S132C.G194C | OKT3.S191C_v2 | 1246 | 1248 | 1243 |
| OKT3.S191C.K133C.G194C | OKT3.S191C_v3 | 1246 | 1249 | 1243 |
| OKT3.S191C.S134C.G194C | OKT3.S191C_v4 | 1246 | 1250 | 1243 |
| OKT3.S191C.T135C.G194C | OKT3.S191C_v5 | 1246 | 1251 | 1243 |
| OKT3.S191C.S136C.G194C | OKT3.S191C_v6 | 1246 | 1252 | 1243 |
| OKT3.S191C.G137C.G194C | OKT3.S191C_v7 | 1246 | 1253 | 1243 |
| OKT3.S191C.G138C.G194C | OKT3.S191C_v8 | 1246 | 1254 | 1243 |
| OKT3.S191C.S131C.T195C | OKT3.S191C_v9 | 1246 | 1255 | 1243 |
| OKT3.S191C.S132C.T195C | OKT3.S191C_v10 | 1246 | 1256 | 1243 |
| OKT3.S191C.K133C.T195C | OKT3.S191C_v11 | 1246 | 1257 | 1243 |
| OKT3.S191C.S134C.T195C | OKT3.S191C_v12 | 1246 | 1258 | 1243 |
| OKT3.S191C.T135C.T195C | OKT3.S191C_v13 | 1246 | 1259 | 1243 |
| OKT3.S191C.S136C.T195C | OKT3.S191C_v14 | 1246 | 1260 | 1243 |
| OKT3.S191C.G137C.T195C | OKT3.S191C_v15 | 1246 | 1261 | 1243 |
| OKT3.S191C.G138C.T195C | OKT3.S191C_v16 | 1246 | 1262 | 1243 |

TABLE 6
OKT3-KiH variants with cysteine substitution

| | | Heavy | Heavy | Heavy | Heavy | |
|---|---|---|---|---|---|---|
| | | chain 1 | chain 1 | chain 2 | chain 2 | |
| | | variable | constant | variable | constant | Light |
| | | region | region | region | region | chain |
| | | SEQ ID | SEQ ID | SEQ ID | SEQ ID | SEQ ID |
| Name of OKT3 variants | Short Name | NO: | NO: | NO: | NO: | NO: |
| OKT3-KiH | OKT3-KiH | 1246 | 1263 | 1246 | 1264 | 1243 |
| OKT3-KiH.S191C | OKT3-KiH.S191C | 1246 | 1265 | 1246 | 1266 | 1243 |
| OKT3-KiH.S191C.S131C/ | OKT3-KiH.S191C_v1 | 1246 | 1267 | 1246 | 1283 | 1243 |
| S191C.G194C | | | | | | |
| OKT3-KiH.S191C.S132C/ | OKT3-KiH.S191C_v2 | 1246 | 1268 | 1246 | 1283 | 1243 |
| S191C.G194C | | | | | | |
| OKT3-KiH.S191C.K133C/ | OKT3-KiH.S191C_v3 | 1246 | 1269 | 1246 | 1283 | 1243 |
| S191C.G194C | | | | | | |
| OKT3-KiH.S191C.S134C/ | OKT3-KiH.S191C_v4 | 1246 | 1270 | 1246 | 1283 | 1243 |
| S191C.G194C | | | | | | |
| OKT3-KiH.S191C.T135C/ | OKT3-KiH.S191C_v5 | 1246 | 1271 | 1246 | 1283 | 1243 |
| S191C.G194C | | | | | | |
| OKT3-KiH.S191C.S136C/ | OKT3-KiH.S191C_v6 | 1246 | 1272 | 1246 | 1283 | 1243 |
| S191C.G194C | | | | | | |
| OKT3-KiH.S191C.G137C/ | OKT3-KiH.S191C_v7 | 1246 | 1273 | 1246 | 1283 | 1243 |
| S191C.G194C | | | | | | |
| OKT3-KiH.S191C.G138C/ | OKT3-KiH.S191C_v8 | 1246 | 1274 | 1246 | 1283 | 1243 |
| S191C.G194C | | | | | | |
| OKT3-KiH.S191C.S131C/ | OKT3-KiH.S191C_v9 | 1246 | 1267 | 1246 | 1284 | 1243 |
| S191C.T195C | | | | | | |
| OKT3-KiH.S191C.S132C/ | OKT3-KiH.S191C_v10 | 1246 | 1268 | 1246 | 1284 | 1243 |
| S191C.T195C | | | | | | |
| OKT3-KiH.S191C.K133C/ | OKT3-KiH.S191C_v11 | 1246 | 1269 | 1246 | 1284 | 1243 |
| S191C.T195C | | | | | | |
| OKT3-KiH.S191C.S134C/ | OKT3-KiH.S191C_v12 | 1246 | 1270 | 1246 | 1284 | 1243 |
| S191C.T195C | | | | | | |
| OKT3-KiH.S191C.T135C/ | OKT3-KiH.S191C_v13 | 1246 | 1271 | 1246 | 1284 | 1243 |
| S191C.T195C | | | | | | |
| OKT3-KiH.S191C.S136C/ | OKT3-KiH.S191C_v14 | 1246 | 1272 | 1246 | 1284 | 1243 |
| S191C.T195C | | | | | | |
| OKT3-KiH.S191C.G137C/ | OKT3-KiH.S191C_v15 | 1246 | 1273 | 1246 | 1284 | 1243 |
| S191C.T195C | | | | | | |
| OKT3-KiH.S191C.G138C/ | OKT3-KiH.S191C_v16 | 1246 | 1274 | 1246 | 1284 | 1243 |
| S191C.T195C | | | | | | |

### Example 1-2 Assessment of Electrophoretic Mobility in Polyacrylamide Gel of Antibodies Having Multiple Additional Disulfide Bonds within the Fab Region

[0920] It was examined whether the antibodies produced in Example 1-1 show a different electrophoretic mobility in polyacrylamide gel by non-reducing SDS-PAGE.

[0921] Sample Buffer Solution (2ME-) (×4) (Wako; 198-13282) was used for preparation of electrophoresis samples. The samples were treated for 10 minutes under the condition of specimen concentration 50 microgram/mL and 70 degrees C., and then subjected to non-reducing SDS-PAGE. In non-reducing SDS-PAGE, electrophoresis was carried out for 90 minutes at 125 V, using 4% SDS-PAGE mini 15 well 1.0 mm 15 well (TEFCO; Cat #01-052-6). Then, the gel was stained with CBB stain, the gel image was captured with ChemiDocTouchMP (BIORAD), and the bands were quantified with Image Lab (BIORAD).

[0922] The gel images are shown in FIGS. 1 to 4. In the gel images, two bands (“upper band” and “lower band”) were observed in the S191C variants, and the molecular weight of the upper bands correspond to that of the parent antibodies. It is highly likely that structural changes such as crosslinking via disulfide bonds of Fabs were caused by cysteine substitution, which resulted in the change in electrophoretic mobility. Thus, the lower band can be considered to correspond to the antibody having one or more engineered disulfide bond(s) formed between the CH1 regions. Among the antibody variant samples with additional cysteine substitutions, most of them showed a higher lower band to upper band ratio, compared to S191C variants. Thus, the results suggest that additional cysteine substitutions to the S191C variants as listed in Table 6 are likely to enhance/promote disulfide bond crosslinking of Fabs, and additional cysteine substitutions could be an effective way to improve or increase the percentage or structural homogeneity of antibody preparation of the S191C variants having an engineered disulfide bond formed at the position 191 of CH1 region of the antibody.

### Example 2 Assessment of Antibodies Having Additional Disulfide Bond and Charged Mutations within the Fab Region

### Example 2-1 Production of Antibodies Having Additional Disulfide Bond and Charged Mutations within the Fab Region

[0923] One disulfide bond and charge mutations were introduced into the heavy chain of an anti-human CD3 antibody, OKT3 (heavy chain: OKT3VH0000-G1T4 (SEQ ID NO: 1242), light chain: OKT3VL0000-KT0 (SEQ ID NO: 1243)).

[0924] An amino acid residue structurally exposed to the surface of the OKT3 heavy chain constant region (G1T4, SEQ ID NO: 1244) was substituted with cysteine to produce the variant of OKT3 heavy chain constant region (G1T4.S191C, SEQ ID NO: 1245) shown in Table 1. In addition, other amino acid residues structurally exposed to the surface of G1T4.S191C were substituted with charged amino acids to produce the variants of G1T4.S191C shown in Table 7. These heavy chain constant regions were each linked with the OKT3 heavy chain variable region (OKT3VH0000, SEQ ID NO: 1246) to produce the OKT3 heavy chain variants, and expression vectors encoding the corresponding genes were produced by a method known in the art.

TABLE 7
G1T4.S191C variants with additional
charged amino acid substitution

| Variants of | | SEQ |
|---|---|---|
| heavy chain | Charged mutations | ID |
| constant region | (EU numbering) | NO: |
| G1T4.S191C0004 | S136K/G137K/G138K/L193D/G194D/T195D | 1285 |
| G1T4.S191C0005 | S136K/G137K/G138K/L193E/G194E/T195E | 1286 |
| G1T4.S191C0006 | S136R/G137R/G138R/L193D/G194D/T195D | 1287 |
| G1T4.S191C0007 | S136R/G137R/G138R/L193E/G194E/T195E | 1288 |
| G1T4.S191C0019 | G137K/G138K/L193D/G194D/T195D | 1289 |
| G1T4.S191C0020 | S136K/G138K/L193D/G194D/T195D | 1290 |
| G1T4.S191C0021 | S136K/G137K/L193D/G194D/T195D | 1291 |
| G1T4.S191C0022 | S136K/G137K/G138K/G194D/T195D | 1292 |
| G1T4.S191C0023 | S136K/G137K/G138K/L193D/T195D | 1293 |
| G1T4.S191C0024 | S136K/G137K/G138K/L193D/G194D | 1294 |
| G1T4.S191C0025 | G137K/G138K/L193E/G194E/T195E | 1295 |
| G1T4.S191C0026 | S136K/G138K/L193E/G194E/T195E | 1296 |
| G1T4.S191C0027 | S136K/G137K/L193E/G194E/T195E | 1297 |
| G1T4.S191C0028 | S136K/G137K/G138K/G194E/T195E | 1298 |
| G1T4.S191C0029 | S136K/G137K/G138K/L193E/T195E | 1299 |
| G1T4.S191C0030 | S136K/G137K/G138K/L193E/G194E | 1300 |
| G1T4.S191C0031 | G137R/G138R/L193D/G194D/T195D | 1301 |
| G1T4.S191C0032 | S136R/G138R/L193D/G194D/T195D | 1302 |
| G1T4.S191C0033 | S136R/G137R/L193D/G194D/T195D | 1303 |
| G1T4.S191C0034 | S136R/G137R/G138R/G194D/T195D | 1304 |
| G1T4.S191C0035 | S136R/G137R/G138R/L193D/T195D | 1305 |
| G1T4.S191C0036 | S136R/G137R/G138R/L193D/G194D | 1306 |
| G1T4.S191C0052 | S136K/L193D/G194D/T195D | 1307 |
| G1T4.S191C0053 | G137K/L193D/G194D/T195D | 1308 |
| G1T4.S191C0054 | G138K/L193D/G194D/T195D | 1309 |
| G1T4.S191C0055 | S136K/L193E/G194E/T195E | 1310 |
| G1T4.S191C0056 | G137K/L193E/G194E/T195E | 1311 |
| G1T4.S191C0057 | G138K/L193E/G194E/T195E | 1312 |
| G1T4.S191C0058 | S136R/L193D/G194D/T195D | 1313 |
| G1T4.S191C0059 | G137R/L193D/G194D/T195D | 1314 |
| G1T4.S191C0060 | G138R/L193D/G194D/T195D | 1315 |
| G1T4.S191C0061 | S136R/L193E/G194E/T195E | 1316 |
| G1T4.S191C0062 | G137R/L193E/G194E/T195E | 1317 |
| G1T4.S191C0063 | G138R/L193E/G194E/T195E | 1318 |
| G1T4.S191C0078 | G138K/T195D | 1319 |
| G1T4.S191C0079 | G138K/T195E | 1320 |
| G1T4.S191C0080 | G138R/T195D | 1321 |
| G1T4.S191C0081 | G138R/T195E | 1322 |
| G1T4.S191C0082 | G138D/T195K | 1323 |
| G1T4.S191C0083 | G138D/T195R | 1324 |
| G1T4.S191C0084 | G138E/T195K | 1325 |
| G1T4.S191C0085 | G138E/T195R | 1326 |
| G1T4.S191C0086 | G138K/G194D | 1327 |
| G1T4.S191C0087 | G138K/G194E | 1328 |
| G1T4.S191C0088 | G138R/G194D | 1329 |
| G1T4.S191C0089 | G138R/G194E | 1330 |
| G1T4.S191C0090 | G138D/G194K | 1331 |
| G1T4.S191C0091 | G138D/G194R | 1332 |
| G1T4.S191C0092 | G138E/G194K | 1333 |
| G1T4.S191C0093 | G138E/G194R | 1334 |
| G1T4.S191C0094 | G137K/T195D | 1335 |
| G1T4.S191C0095 | G137K/T195E | 1336 |
| G1T4.S191C0096 | G137R/T195D | 1337 |
| G1T4.S191C0097 | G137R/T195E | 1338 |
| G1T4.S191C0098 | G137D/T195K | 1339 |
| G1T4.S191C0099 | G137D/T195R | 1340 |
| G1T4.S191C0100 | G137E/T195K | 1341 |
| G1T4.S191C0101 | G137E/T195R | 1342 |
| G1T4.S191C0102 | G137K/G194D | 1343 |
| G1T4.S191C0103 | G137K/G194E | 1344 |
| G1T4.S191C0104 | G137R/G194D | 1345 |
| G1T4.S191C0105 | G137R/G194E | 1346 |
| G1T4.S191C0106 | G137D/G194K | 1347 |
| G1T4.S191C0107 | G137D/G194R | 1348 |
| G1T4.S191C0108 | G137E/G194K | 1349 |
| G1T4.S191C0109 | G137E/G194R | 1350 |
| G1T4.S191C0110 | G137K/G138K/G194E/T195E | 1351 |
| G1T4.S191C0111 | G137K/G138K/L193E/T195E | 1352 |
| G1T4.S191C0112 | S136K/G138K/G194E/T195E | 1353 |
| G1T4.S191C0113 | S136K/G138K/L193E/T195E | 1354 |
| G1T4.S191C0114 | S136K/G137K/G194E/T195E | 1355 |
| G1T4.S191C0115 | S136K/G137K/L193E/T195E | 1356 |
| G1T4.S191C0116 | S136K/G194E/T195E | 1357 |
| G1T4.S191C0117 | S136K/L193E/T195E | 1358 |
| G1T4.S191C0118 | G137K/G194E/T195E | 1359 |
| G1T4.S191C0119 | G137K/L193E/T195E | 1360 |
| G1T4.S191C0120 | G138K/G194E/T195E | 1361 |
| G1T4.S191C0121 | G138K/L193E/T195E | 1362 |
| G1T4.S191C0122 | G137R/G138R/G194D/T195D | 1363 |
| G1T4.S191C0123 | G137R/G138R/L193D/T195D | 1364 |
| G1T4.S191C0124 | S136R/G138R/G194D/T195D | 1365 |
| G1T4.S191C0125 | S136R/G138R/L193D/T195D | 1366 |
| G1T4.S191C0126 | S136R/G137R/G194D/T195D | 1367 |
| G1T4.S191C0127 | S136R/G137R/L193D/T195D | 1368 |
| G1T4.S191C0128 | S136R/G194D/T195D | 1369 |
| G1T4.S191C0129 | S136R/L193D/T195D | 1370 |
| G1T4.S191C0130 | G137R/G194D/T195D | 1371 |
| G1T4.S191C0131 | G137R/L193D/T195D | 1372 |
| G1T4.S191C0132 | G138R/G194D/T195D | 1373 |
| G1T4.S191C0133 | G138R/L193D/T195D | 1374 |
| G1T4.S191C0134 | S136K/T195D | 1375 |
| G1T4.S191C0135 | S136K/T195E | 1376 |
| G1T4.S191C0136 | S136R/T195D | 1377 |
| G1T4.S191C0137 | S136R/T195E | 1378 |
| G1T4.S191C0138 | S136D/T195K | 1379 |
| G1T4.S191C0139 | S136D/T195R | 1380 |
| G1T4.S191C0140 | S136E/T195K | 1381 |
| G1T4.S191C0141 | S136E/T195R | 1382 |
| G1T4.S191C0142 | S136K/G194D | 1383 |
| G1T4.S191C0143 | S136K/G194E | 1384 |
| G1T4.S191C0144 | S136R/G194D | 1385 |
| G1T4.S191C0145 | S136R/G194E | 1386 |
| G1T4.S191C0146 | S136D/G194K | 1387 |
| G1T4.S191C0147 | S136D/G194R | 1388 |
| G1T4.S191C0148 | S136E/G194K | 1389 |
| G1T4.S191C0149 | S136E/G194R | 1390 |

[0925] The OKT3 heavy chain variants produced as mentioned above were combined with the OKT3 light chain. The OKT3 variants shown in Table 8 were expressed by transient expression using Expi293 cells (Life technologies) by a method known in the art, and purified with Protein A by a method known in the art. In this Example, OKT3 is called “parent antibody”, OKT3.S191C is called “S191C variant”, and its variants are called “charged variants”.

TABLE 8
OKT3 variants with cysteine and charged amino acid substitution

| | Heavy | Heavy | |
|---|---|---|---|
| | chain | chain | |
| | variable | constant | Light |
| | region | region | chain |
| Name of OKT3 | SEQ | SEQ | SEQ |
| variants | ID NO: | ID NO: | ID NO: |
| OKT3 | 1246 | 1244 | 1243 |
| OKT3.S191C | 1246 | 1245 | 1243 |
| OKT3.S191C0004 | 1246 | 1285 | 1243 |
| OKT3.S191C0005 | 1246 | 1286 | 1243 |
| OKT3.S191C0006 | 1246 | 1287 | 1243 |
| OKT3.S191C0007 | 1246 | 1288 | 1243 |
| OKT3.S191C0019 | 1246 | 1289 | 1243 |
| OKT3.S191C0020 | 1246 | 1290 | 1243 |
| OKT3.S191C0021 | 1246 | 1291 | 1243 |
| OKT3.S191C0022 | 1246 | 1292 | 1243 |
| OKT3.S191C0023 | 1246 | 1293 | 1243 |
| OKT3.S191C0024 | 1246 | 1294 | 1243 |
| OKT3.S191C0025 | 1246 | 1295 | 1243 |
| OKT3.S191C0026 | 1246 | 1296 | 1243 |
| OKT3.S191C0027 | 1246 | 1297 | 1243 |
| OKT3.S191C0028 | 1246 | 1298 | 1243 |
| OKT3.S191C0029 | 1246 | 1299 | 1243 |
| OKT3.S191C0030 | 1246 | 1300 | 1243 |
| OKT3.S191C0031 | 1246 | 1301 | 1243 |
| OKT3.S191C0032 | 1246 | 1302 | 1243 |
| OKT3.S191C0033 | 1246 | 1303 | 1243 |
| OKT3.S191C0034 | 1246 | 1304 | 1243 |
| OKT3.S191C0035 | 1246 | 1305 | 1243 |
| OKT3.S191C0036 | 1246 | 1306 | 1243 |
| OKT3.S191C0052 | 1246 | 1307 | 1243 |
| OKT3.S191C0053 | 1246 | 1308 | 1243 |
| OKT3.S191C0054 | 1246 | 1309 | 1243 |
| OKT3.S191C0055 | 1246 | 1310 | 1243 |
| OKT3.S191C0056 | 1246 | 1311 | 1243 |
| OKT3.S191C0057 | 1246 | 1312 | 1243 |
| OKT3.S191C0058 | 1246 | 1313 | 1243 |
| OKT3.S191C0059 | 1246 | 1314 | 1243 |
| OKT3.S191C0060 | 1246 | 1315 | 1243 |
| OKT3.S191C0061 | 1246 | 1316 | 1243 |
| OKT3.S191C0062 | 1246 | 1317 | 1243 |
| OKT3.S191C0063 | 1246 | 1318 | 1243 |
| OKT3.S191C0078 | 1246 | 1319 | 1243 |
| OKT3.S191C0079 | 1246 | 1320 | 1243 |
| OKT3.S191C0080 | 1246 | 1321 | 1243 |
| OKT3.S191C0081 | 1246 | 1322 | 1243 |
| OKT3.S191C0082 | 1246 | 1323 | 1243 |
| OKT3.S191C0083 | 1246 | 1324 | 1243 |
| OKT3.S191C0084 | 1246 | 1325 | 1243 |
| OKT3.S191C0085 | 1246 | 1326 | 1243 |
| OKT3.S191C0086 | 1246 | 1327 | 1243 |
| OKT3.S191C0087 | 1246 | 1328 | 1243 |
| OKT3.S191C0088 | 1246 | 1329 | 1243 |
| OKT3.S191C0089 | 1246 | 1330 | 1243 |
| OKT3.S191C0090 | 1246 | 1331 | 1243 |
| OKT3.S191C0091 | 1246 | 1332 | 1243 |
| OKT3.S191C0092 | 1246 | 1333 | 1243 |
| OKT3.S191C0093 | 1246 | 1334 | 1243 |
| OKT3.S191C0094 | 1246 | 1335 | 1243 |
| OKT3.S191C0095 | 1246 | 1336 | 1243 |
| OKT3.S191C0096 | 1246 | 1337 | 1243 |
| OKT3.S191C0097 | 1246 | 1338 | 1243 |
| OKT3.S191C0098 | 1246 | 1339 | 1243 |
| OKT3.S191C0099 | 1246 | 1340 | 1243 |
| OKT3.S191C0100 | 1246 | 1341 | 1243 |
| OKT3.S191C0101 | 1246 | 1342 | 1243 |
| OKT3.S191C0102 | 1246 | 1343 | 1243 |
| OKT3.S191C0103 | 1246 | 1344 | 1243 |
| OKT3.S191C0104 | 1246 | 1345 | 1243 |
| OKT3.S191C0105 | 1246 | 1346 | 1243 |
| OKT3.S191C0106 | 1246 | 1347 | 1243 |
| OKT3.S191C0107 | 1246 | 1348 | 1243 |
| OKT3.S191C0108 | 1246 | 1349 | 1243 |
| OKT3.S191C0109 | 1246 | 1350 | 1243 |
| OKT3.S191C0110 | 1246 | 1351 | 1243 |
| OKT3.S191C0111 | 1246 | 1352 | 1243 |
| OKT3.S191C0112 | 1246 | 1353 | 1243 |
| OKT3.S191C0113 | 1246 | 1354 | 1243 |
| OKT3.S191C0114 | 1246 | 1355 | 1243 |
| OKT3.S191C0115 | 1246 | 1356 | 1243 |
| OKT3.S191C0116 | 1246 | 1357 | 1243 |
| OKT3.S191C0117 | 1246 | 1358 | 1243 |
| OKT3.S191C0118 | 1246 | 1359 | 1243 |
| OKT3.S191C0119 | 1246 | 1360 | 1243 |
| OKT3.S191C0120 | 1246 | 1361 | 1243 |
| OKT3.S191C0121 | 1246 | 1362 | 1243 |
| OKT3.S191C0122 | 1246 | 1363 | 1243 |
| OKT3.S191C0123 | 1246 | 1364 | 1243 |
| OKT3.S191C0124 | 1246 | 1365 | 1243 |
| OKT3.S191C0125 | 1246 | 1366 | 1243 |
| OKT3.S191C0126 | 1246 | 1367 | 1243 |
| OKT3.S191C0127 | 1246 | 1368 | 1243 |
| OKT3.S191C0128 | 1246 | 1369 | 1243 |
| OKT3.S191C0129 | 1246 | 1370 | 1243 |
| OKT3.S191C0130 | 1246 | 1371 | 1243 |
| OKT3.S191C0131 | 1246 | 1372 | 1243 |
| OKT3.S191C0132 | 1246 | 1373 | 1243 |
| OKT3.S191C0133 | 1246 | 1374 | 1243 |
| OKT3.S191C0134 | 1246 | 1375 | 1243 |
| OKT3.S191C0135 | 1246 | 1376 | 1243 |
| OKT3.S191C0136 | 1246 | 1377 | 1243 |
| OKT3.S191C0137 | 1246 | 1378 | 1243 |
| OKT3.S191C0138 | 1246 | 1379 | 1243 |
| OKT3.S191C0139 | 1246 | 1380 | 1243 |
| OKT3.S191C0140 | 1246 | 1381 | 1243 |
| OKT3.S191C0141 | 1246 | 1382 | 1243 |
| OKT3.S191C0142 | 1246 | 1383 | 1243 |
| OKT3.S191C0143 | 1246 | 1384 | 1243 |
| OKT3.S191C0144 | 1246 | 1385 | 1243 |
| OKT3.S191C0145 | 1246 | 1386 | 1243 |
| OKT3.S191C0146 | 1246 | 1387 | 1243 |
| OKT3.S191C0147 | 1246 | 1388 | 1243 |
| OKT3.S191C0148 | 1246 | 1389 | 1243 |
| OKT3.S191C0149 | 1246 | 1390 | 1243 |

### Example 2-2 Assessment of Electrophoretic Mobility in Polyacrylamide Gel of Antibodies Having Additional Disulfide Bond and Charged Mutations within the Fab Region

[0926] Similarly to Example 1-2, non-reducing SDS-PAGE was carried out with the charged variants produced in Example 2-1, the gel image was captured, and intensities of bands were quantified.

[0927] In the gel images, two bands were observed in the S191C variant, and the molecular weight of the upper bands correspond to that of the parent antibody. It is highly likely that structural changes such as crosslinking via disulfide bonds of Fabs were caused by cysteine substitution, which resulted in the change in electrophoretic mobility. Thus, the lower band can be considered to correspond to the antibody having one or more engineered disulfide bond(s) formed between the CH1 regions. The ratio of the lower band to upper band are shown in Table 9. Among charged variants, most of them showed a higher lower band to upper band ratio, compared to that of S191C variants. Thus, the results suggest that additional charged amino acid mutations to the S191C variants as listed in Table 7 are likely to enhance/promote disulfide bond crosslinking of Fabs, and additional charged amino acid mutations could be an effective way to improve or increase the percentage or structural homogeneity of antibody preparation of the S191C variants having an engineered disulfide bond formed at the position 191 of CH1 region of the antibody.

TABLE 9
The ratio of the lower band to upper band of OKT3 variants
with cysteine and charged amino acid substitution

| | Ratio of |
|---|---|
| Name of OKT3 | lower band to |
| variants | upper band (%) |
| OKT3 | 0 |
| OKT3.S191C | 65.4 |
| OKT3.S191C0004 | 86.3 |
| OKT3.S191C0005 | 87.2 |
| OKT3.S191C0006 | 87.4 |
| OKT3.S191C0007 | 83.8 |
| OKT3.S191C0019 | 85.1 |
| OKT3.S191C0020 | 82.6 |
| OKT3.S191C0021 | 83.7 |
| OKT3.S191C0022 | 77 |
| OKT3.S191C0023 | 78.1 |
| OKT3.S191C0024 | 75.2 |
| OKT3.S191C0025 | 84 |
| OKT3.S191C0026 | 85.9 |
| OKT3.S191C0027 | 85.6 |
| OKT3.S191C0028 | 70.3 |
| OKT3.S191C0029 | 77.4 |
| OKT3.S191C0030 | 79.4 |
| OKT3.S191C0031 | 87.9 |
| OKT3.S191C0032 | 84.4 |
| OKT3.S191C0033 | 85.4 |
| OKT3.S191C0034 | 79.9 |
| OKT3.S191C0035 | 82 |
| OKT3.S191C0036 | 82.3 |
| OKT3.S191C0052 | 75.5 |
| OKT3.S191C0053 | 85.7 |
| OKT3.S191C0054 | 77.7 |
| OKT3.S191C0055 | 79 |
| OKT3.S191C0056 | 87.2 |
| OKT3.S191C0057 | 83 |
| OKT3.S191C0058 | 84.7 |
| OKT3.S191C0059 | 78.6 |
| OKT3.S191C0060 | 74.7 |
| OKT3.S191C0061 | 88.4 |
| OKT3.S191C0062 | 87.2 |
| OKT3.S191C0063 | 85.5 |
| OKT3.S191C0078 | 74.6 |
| OKT3.S191C0079 | 69.7 |
| OKT3.S191C0080 | 76.5 |
| OKT3.S191C0081 | 72.9 |
| OKT3.S191C0082 | 56.2 |
| OKT3.S191C0083 | 69.7 |
| OKT3.S191C0084 | 46.5 |
| OKT3.S191C0085 | 67.1 |
| OKT3.S191C0086 | 58.2 |
| OKT3.S191C0087 | 49.7 |
| OKT3.S191C0088 | 63.7 |
| OKT3.S191C0089 | 65.5 |
| OKT3.S191C0090 | 43.9 |
| OKT3.S191C0091 | 56.9 |
| OKT3.S191C0092 | 43.9 |
| OKT3.S191C0093 | 53.5 |
| OKT3.S191C0094 | 79.2 |
| OKT3.S191C0095 | 77.6 |
| OKT3.S191C0096 | 79.3 |
| OKT3.S191C0097 | 71.1 |
| OKT3.S191C0098 | 45.3 |
| OKT3.S191C0099 | 60 |
| OKT3.S191C0100 | 45.6 |
| OKT3.S191C0101 | 55.9 |
| OKT3.S191C0102 | 72 |
| OKT3.S191C0103 | 73.2 |
| OKT3.S191C0104 | 76.3 |
| OKT3.S191C0105 | 74.3 |
| OKT3.S191C0106 | 42.1 |
| OKT3.S191C0107 | 52.1 |
| OKT3.S191C0108 | 38.1 |
| OKT3.S191C0109 | 44.8 |
| OKT3.S191C0110 | 72.1 |
| OKT3.S191C0111 | 79.2 |
| OKT3.S191C0112 | 72.5 |
| OKT3.S191C0113 | 78.8 |
| OKT3.S191C0114 | 71.5 |
| OKT3.S191C0115 | 78.5 |
| OKT3.S191C0116 | 66.4 |
| OKT3.S191C0117 | 78.2 |
| OKT3.S191C0118 | 86.3 |
| OKT3.S191C0119 | 83.4 |
| OKT3.S191C0120 | no data |
| OKT3.S191C0121 | 82.1 |
| OKT3.S191C0122 | 82.3 |
| OKT3.S191C0123 | 76.6 |
| OKT3.S191C0124 | 76.8 |
| OKT3.S191C0125 | 78.7 |
| OKT3.S191C0126 | 85.5 |
| OKT3.S191C0127 | 88.1 |
| OKT3.S191C0128 | 77.7 |
| OKT3.S191C0129 | 79.2 |
| OKT3.S191C0130 | 80 |
| OKT3.S191C0131 | 85.3 |
| OKT3.S191C0132 | 87.6 |
| OKT3.S191C0133 | 87.6 |
| OKT3.S191C0134 | 66.7 |
| OKT3.S191C0135 | 72.5 |
| OKT3.S191C0136 | 73.7 |
| OKT3.S191C0137 | 71.9 |
| OKT3.S191C0138 | 45.1 |
| OKT3.S191C0139 | 58.6 |
| OKT3.S191C0140 | 41.4 |
| OKT3.S191C0141 | 57 |
| OKT3.S191C0142 | 70.5 |
| OKT3.S191C0143 | 66 |
| OKT3.S191C0144 | 75.9 |
| OKT3.S191C0145 | 68.3 |
| OKT3.S191C0146 | 43.5 |
| OKT3.S191C0147 | 53.8 |
| OKT3.S191C0148 | 40 |
| OKT3.S191C0149 | 49.8 |

### Example 3 Assessment of Antibodies Having Additional Disulfide Bond and Hydrophobic Mutations within the Fab Region

### Example 3-1 Production of Antibodies Having Additional Disulfide Bond and Hydrophobic Mutations within Fab Region

[0928] One disulfide bond and charge mutations were introduced into the heavy chain of an anti-human CD3 antibody, OKT3 (heavy chain: OKT3VH0000-G1T4 (SEQ ID NO: 1242), light chain: OKT3VL0000-KT0 (SEQ ID NO: 1243)).

[0929] An amino acid residue structurally exposed to the surface of the OKT3 heavy chain constant region (G1T4, SEQ ID NO: 1244) was substituted with cysteine to produce the variant of OKT3 heavy chain constant region (G1T4.S191C, SEQ ID NO: 1245) shown in Table 1. In addition, other amino acid residues structurally exposed to the surface of G1T4.S191C were substituted with hydrophobic amino acids to produce the variants of G1T4.S191C shown in Table 10. These heavy chain constant regions were each linked with the OKT3 heavy chain variable region (OKT3VH0000, SEQ ID NO: 1246) to produce the OKT3 heavy chain variants, and expression vectors encoding the corresponding genes were produced by a method known in the art.

TABLE 10
G1T4.S191C variants with hydrophobic amino acid substitution

| Variants of | | |
|---|---|---|
| heavy chain | Hydrophobic mutations | SEQ |
| constant region | (EU numbering) | ID NO: |
| G1T4.S191C0001 | S136W/G137W/G138W/L193W/G194W/T195W | 1391 |
| G1T4.S191C0002 | S136L/G137L/G138L/G194L/T195L | 1392 |
| G1T4.S191C0003 | S136V/G137V/G138V/L193V/G194V/T195V | 1393 |
| G1T4.S191C0008 | S136A/G137A/G138A/L193A/G194A/T195A | 1394 |
| G1T4.S191C0009 | S136V/G137V/G138V/L193W/G194W/T195W | 1395 |
| G1T4.S191C0010 | S136W/G137W/G138W/L193V/G194V/T195V | 1396 |
| G1T4.S191C0011 | S136V/G137V/G138V/G194L/T195L | 1397 |
| G1T4.S191C0012 | S136L/G137L/G138L/L193V/G194V/T195V | 1398 |
| G1T4.S191C0013 | G137V/G138V/L193V/G194V/T195V | 1399 |
| G1T4.S191C0014 | S136V/G138V/L193V/G194V/T195V | 1400 |
| G1T4.S191C0015 | S136V/G137V/L193V/G194V/T195V | 1401 |
| G1T4.S191C0016 | S136V/G137V/G138V/G194V/T195V | 1402 |
| G1T4.S191C0017 | S136V/G137V/G138V/L193V/T195V | 1403 |
| G1T4.S191C0018 | S136V/G137V/G138V/L193V/G194V | 1404 |
| G1T4.S191C0037 | S136A/G137A/G138A/L193W/G194W/T195W | 1405 |
| G1T4.S191C0038 | S136A/G137A/G138A/G194L/T195L | 1406 |
| G1T4.S191C0039 | S136A/G137A/G138A/L193V/G194V/T195V | 1407 |
| G1T4.S191C0040 | S136W/G137W/G138W/L193A/G194A/T195A | 1408 |
| G1T4.S191C0041 | G137W/G138W/L193A/G194A/T195A | 1409 |
| G1T4.S191C0042 | S136W/G138W/L193A/G194A/T195A | 1410 |
| G1T4.S191C0043 | S136W/G137W/L193A/G194A/T195A | 1411 |
| G1T4.S191C0044 | S136W/L193A/G194A/T195A | 1412 |
| G1T4.S191C0045 | G137W/L193A/G194A/T195A | 1413 |
| G1T4.S191C0046 | G138W/L193A/G194A/T195A | 1414 |
| G1T4.S191C0047 | S136L/G137L/G138L/L193A/G194A/T195A | 1415 |
| G1T4.S191C0048 | S136V/G137V/G138V/L193A/G194A/T195A | 1416 |
| G1T4.S191C0049 | S136V/L193V/G194V/T195V | 1417 |
| G1T4.S191C0050 | G137V/L193V/G194V/T195V | 1418 |
| G1T4.S191C0051 | G138V/L193V/G194V/T195V | 1419 |
| G1T4.S191C0072 | S136W/L193S/G194V/T195A | 1420 |
| G1T4.S191C0073 | G137W/L193S/G194V/T195A | 1421 |
| G1T4.S191C0074 | G138W/L193S/G194V/T195A | 1422 |
| G1T4.S191C0075 | G137V/G138A/L193W | 1423 |
| G1T4.S191C0076 | G137V/G138A/G194W | 1424 |
| G1T4.S191C0077 | G137V/G138A/T195W | 1425 |

[0930] The OKT3 heavy chain variants produced as mentioned above were combined with the OKT3 light chain. The OKT3 variants shown in Table 11 were expressed by transient expression using Expi293 cells (Life technologies) by a method known in the art, and purified with Protein A by a method known in the art. In this Example, OKT3 is called “parent antibody”, OKT3.S191C is called “S191C variant”, and its variants are called “hydrophobic variants”.

TABLE 11
OKT3 variants with cysteine and hydrophobic
amino acid substitution

| | Heavy | Heavy | |
|---|---|---|---|
| | chain | chain | |
| | variable | constant | Light |
| | region | region | chain |
| Name of OKT3 | SEQ | SEQ | SEQ |
| variants | ID NO: | ID NO: | ID NO: |
| OKT3 | 1246 | 1244 | 1243 |
| OKT3.S191C | 1246 | 1245 | 1243 |
| OKT3.S191C0001 | 1246 | 1391 | 1243 |
| OKT3.S191C0002 | 1246 | 1392 | 1243 |
| OKT3.S191C0003 | 1246 | 1393 | 1243 |
| OKT3.S191C0008 | 1246 | 1394 | 1243 |
| OKT3.S191C0009 | 1246 | 1395 | 1243 |
| OKT3.S191C0010 | 1246 | 1396 | 1243 |
| OKT3.S191C0011 | 1246 | 1397 | 1243 |
| OKT3.S191C0012 | 1246 | 1398 | 1243 |
| OKT3.S191C0013 | 1246 | 1399 | 1243 |
| OKT3.S191C0014 | 1246 | 1400 | 1243 |
| OKT3.S191C0015 | 1246 | 1401 | 1243 |
| OKT3.S191C0016 | 1246 | 1402 | 1243 |
| OKT3.S191C0017 | 1246 | 1403 | 1243 |
| OKT3.S191C0018 | 1246 | 1404 | 1243 |
| OKT3.S191C0037 | 1246 | 1405 | 1243 |
| OKT3.S191C0038 | 1246 | 1406 | 1243 |
| OKT3.S191C0039 | 1246 | 1407 | 1243 |
| OKT3.S191C0040 | 1246 | 1408 | 1243 |
| OKT3.S191C0041 | 1246 | 1409 | 1243 |
| OKT3.S191C0042 | 1246 | 1410 | 1243 |
| OKT3.S191C0043 | 1246 | 1411 | 1243 |
| OKT3.S191C0044 | 1246 | 1412 | 1243 |
| OKT3.S191C0045 | 1246 | 1413 | 1243 |
| OKT3.S191C0046 | 1246 | 1414 | 1243 |
| OKT3.S191C0047 | 1246 | 1415 | 1243 |
| OKT3.S191C0048 | 1246 | 1416 | 1243 |
| OKT3.S191C0049 | 1246 | 1417 | 1243 |
| OKT3.S191C0050 | 1246 | 1418 | 1243 |
| OKT3.S191C0051 | 1246 | 1419 | 1243 |
| OKT3.S191C0072 | 1246 | 1420 | 1243 |
| OKT3.S191C0073 | 1246 | 1421 | 1243 |
| OKT3.S191C0074 | 1246 | 1422 | 1243 |
| OKT3.S191C0075 | 1246 | 1423 | 1243 |
| OKT3.S191C0076 | 1246 | 1424 | 1243 |
| OKT3.S191C0077 | 1246 | 1425 | 1243 |

### Example 3-2 Assessment of Electrophoretic Mobility in Polyacrylamide Gel of Antibodies Having Additional Disulfide Bond and Hydrophobic Mutations within the Fab Region

[0931] Similarly to Example 1-2, non-reducing SDS-PAGE was carried out with the hydrophobic variants produced in Example 3-1, the gel image was captured, and bands were quantified.

[0932] In the gel images, two bands were observed in S191C variant, and the molecular weight of the upper bands correspond to that of the parent antibody. It is highly likely that structural changes such as crosslinking via disulfide bonds of Fabs were caused by cysteine substitution, which resulted in the change in electrophoretic mobility. Thus, the lower band can be considered to correspond to the antibody having one or more engineered disulfide bond(s) formed between the CH1 regions. The ratio of the lower bands to upper bands are shown in Table 12. Among hydrophobic variants, most of them showed a higher lower band to upper band ratio, compared to that of S191C variants. It is highly likely that structural changes such as crosslinking via disulfide bonds of Fabs were caused by cysteine substitution, which resulted in the change in electrophoretic mobility. Thus, the results suggest that additional hydrophobic amino acid mutations to the S191C variants as listed in Table 10 are likely to enhance/promote disulfide bond crosslinking of Fabs, and additional hydrophobic amino acid mutations could be an effective way to improve or increase the percentage or structural homogeneity of antibody preparation of the S191C variants having an engineered disulfide bond formed at the position 191 of CH1 region of the antibody.

TABLE 12
The ratio of the lower band to upper band of OKT3 variants
with cysteine and hydrophobic amino acid substitution

| | Ratio of |
|---|---|
| Name of OKT3 | lower band to |
| variants | upper band (%) |
| OKT3 | 0 |
| OKT3.S191C | 65.4 |
| OKT3.S191C0001 | no data |
| OKT3.S191C0002 | no data |
| OKT3.S191C0003 | no data |
| OKT3.S191C0008 | 75.7 |
| OKT3.S191C0009 | no data |
| OKT3.S191C0010 | no data |
| OKT3.S191C0011 | no data |
| OKT3.S191C0012 | 91.3 |
| OKT3.S191C0013 | no data |
| OKT3.S191C0014 | 83.5 |
| OKT3.S191C0015 | 82.7 |
| OKT3.S191C0016 | no data |
| OKT3.S191C0017 | 69.9 |
| OKT3.S191C0018 | 76.1 |
| OKT3.S191C0037 | 87.3 |
| OKT3.S191C0038 | 77.3 |
| OKT3.S191C0039 | 81 |
| OKT3.S191C0040 | 93.9 |
| OKT3.S191C0041 | 87.7 |
| OKT3.S191C0042 | 95.7 |
| OKT3.S191C0043 | 94.1 |
| OKT3.S191C0044 | 94.8 |
| OKT3.S191C0045 | 82 |
| OKT3.S191C0046 | 93.7 |
| OKT3.S191C0047 | 95.1 |
| OKT3.S191C0048 | 82.5 |
| OKT3.S191C0049 | 81.5 |
| OKT3.S191C0050 | 77.7 |
| OKT3.S191C0051 | no data |
| OKT3.S191C0072 | 83.9 |
| OKT3.S191C0073 | 85.5 |
| OKT3.S191C0074 | 87.6 |
| OKT3.S191C0075 | 63.2 |
| OKT3.S191C0076 | 88.3 |
| OKT3.S191C0077 | 84.1 |

### Example 4 Assessment of Effect of De-Cysteinylation by a Reducing Agent Such as 2-MEA to Promote Formation of Disulfide Bonds in Fabs

### Example 4-1 Production of Antibodies Having Cysteine Substitution in the Heavy Chain

[0933] Amino acid residue at position 191 (EU numbering) in the heavy chain of an anti-human IL6R neutralizing antibody, MRA, was substituted with cysteine (heavy chain: MRAH-G1T4.S191C (SEQ ID NO: 1426, light chain: MRAL-k0 (SEQ ID NO: 1427). Expression vectors encoding the corresponding genes were produced by a method known in the art.

[0934] This antibody was expressed by transient expression using Expi293 cells (Life technologies) by a method known in the art, and purified with Protein A by a method known in the art. It was concentrated to 24.1 mg/mL using Jumbosep Centrifugal Filter (PALL: OD030C65) for use in high concentrations.

### Example 4-2 Preparation of Antibody Samples Treated with 2-MEA

[0935] Using the antibody produced in Example 4-1, it was examined whether treatment/incubation with a reducing agent such as 2-MEA (2-Mercaptoethylamin) can promote formation of disulfide bonds in Fabs by inducing de-cysteinylation of capped-cysteine residues that do not form disulfide bond cross-linking. 2-MEA (Sigma-Aldrich: M6500) was dissolved in 25 mM NaCl, 20 mM Na-Phosphate buffer, pH7.0. The antibody and 2-MEA were mixed to the concentration shown in Table 13, and incubated in 5 mM NaCl, 20 mM Na-Phosphate buffer, pH7.0 at 37 degrees C. for 2 hours. To stop the reduction reaction, the buffer of the mixtures with 2-MEA was changed to the buffer without 2-MEA. Then, the samples were incubated at room temperature overnight for re-oxidation.

TABLE 13
Concentrations of antibody and 2-MEA in each sample

| | Antibody | Reagents | | |
|---|---|---|---|---|
| Sample | conc. | Conc. | FIG. | Lane |
| No. | (mM) | (mM) | No. | No. |
| 1 [Control] | 20 | 0 | 5, 6 | 3 |
| 2 | 20 | 0.01 | 5 | 4 |
| 3 | 20 | 0.05 | 5 | 5 |
| 4 | 20 | 0.1 | 5 | 6 |
| 5 | 20 | 0.25 | 6 | 4 |
| 6 | 20 | 0.5 | 6 | 5 |
| 7 | 20 | 1 | 6 | 6 |
| 8 | 20 | 2.5 | 6 | 7 |
| 9 | 20 | 5 | 6 | 8 |
| 10 | 20 | 10 | 6 | 9 |
| 11 | 20 | 25 | 6 | 10 |
| 12 | 20 | 50 | 6 | 11 |
| 13 | 20 | 100 | 6 | 12 |
| 14 [Control] | 1 | 0 | 7, 8 | 3 |
| 15 | 1 | 0.01 | 7 | 4 |
| 16 | 1 | 0.05 | 7 | 5 |
| 17 | 1 | 0.1 | 7 | 6 |
| 18 | 1 | 0.25 | 8 | 4 |
| 19 | 1 | 0.5 | 8 | 5 |
| 20 | 1 | 1 | 8 | 6 |
| 21 | 1 | 2.5 | 8 | 7 |
| 22 | 1 | 5 | 8 | 8 |
| 23 | 1 | 10 | 8 | 9 |
| 24 | 1 | 25 | 8 | 10 |
| 25 | 1 | 50 | 8 | 11 |
| 26 | 1 | 100 | 8 | 12 |

### Example 4-3 Assessment of Electrophoretic Mobility in Polyacrylamide Gel of the Samples in Each Concentration with Antibody and 2-MEA

[0936] It was examined whether the antibody samples treated with 2-MEA produced in Example 4-2 show a different electrophoretic mobility (i.e. different lower band to upper band ratio) in polyacrylamide gel by non-reducing SDS-PAGE.

[0937] Sample Buffer Solution (2ME-) (×4) (Wako; 198-13282) was used for preparation of electrophoresis samples. The samples were treated for 10 minutes under the condition of specimen concentration 100 microgram/mL and 70 degrees C., and then subjected to non-reducing SDS-PAGE. In non-reducing SDS-PAGE, electrophoresis was carried out for 90 minutes at 125 V, using 4% SDS-PAGE mini 15 well 1.0 mm 15 well (TEFCO; 01-052-6). Then, the gel was stained with CBB stain, the gel image was captured with ChemiDocTouchMP (BIORAD), and the bands were quantified with Image Lab (BIORAD).

[0938] The gel images are shown in FIGS. 5 to 8. In the gel images, two bands were observed in the sample without (0 mM of) a reducing agent (control; lane 3 in each figure), and the molecular weights of the upper bands correspond to that of the parent antibody. It is highly likely that structural changes such as crosslinking via disulfide bonds of Fabs were caused by cysteine substitution, which resulted in the change in electrophoretic mobility. Thus, the lower band can be considered to correspond to the antibody having one or more engineered disulfide bond(s) formed between the CH1 regions. The results show that most of antibody samples treated/incubated with 2-MEA showed a higher lower band to higher band ratio, compared to antibody samples without 2-MEA treatment. The results suggest that incubation of the antibody with a reducing agent such as 2-MEA could be an effective way to improve or increase the percentage or structural homogeneity of antibody preparation of the S191C variants having an engineered disulfide bond formed at the position 191 of the CH1 region of the antibody.

### Example 5 Assessment of Effect of De-Cysteinylation by a Reducing Agent Such as TCEP to Promote Formation of Disulfide Bonds in Fabs

### Example 5-1 Preparation of Antibody Samples Treated with TCEP

[0939] Using the antibody produced in Example 4-1, it was examined whether treatment/incubation with a reducing agent such as TCEP can promote formation of disulfide bonds in Fabs by inducing de-cysteinylation of capped-cysteine residues that do not form disulfide bond cross-linking.

[0940] TCEP (Sigma-Aldrich: C4706) was dissolved in ultra pure water and adjusted to pH 7 with NaOH. The antibody and TCEP were mixed to the concentration shown in Table 14, and incubated in 5 mM NaCl, 20 mM Na-Phosphate buffer, pH7.0 at 37 degrees C. for 2 hours. To stop the reduction reaction, the buffer of the mixtures with TCEP was changed to the buffer without TCEP. Then, the samples were incubated at room temperature (RT) overnight for re-oxidation.

TABLE 14
Concentrations of antibody and TCEP in each sample

| | Antibody | Reagents | | |
|---|---|---|---|---|
| Sample | conc. | Conc. | FIG. | Lane |
| No. | (mM) | (mM) | No. | No. |
| 1 [Control] | 20 | 0 | 9, 10 | 3 |
| 2 | 20 | 0.01 | 9 | 4 |
| 3 | 20 | 0.05 | 9 | 5 |
| 4 | 20 | 0.1 | 9 | 6 |
| 5 | 20 | 0.25 | 10 | 4 |
| 6 | 20 | 0.5 | 10 | 5 |
| 7 | 20 | 1 | 10 | 6 |
| 8 | 20 | 2.5 | 10 | 7 |
| 9 | 20 | 5 | 10 | 8 |
| 10 | 20 | 10 | 10 | 9 |
| 11 | 20 | 25 | 10 | 10 |
| 12 | 20 | 50 | 10 | 11 |
| 13 | 20 | 100 | 10 | 12 |
| 14 [Control] | 1 | 0 | 11 | 3 |
| 15 | 1 | 0.25 | 11 | 4 |
| 16 | 1 | 0.5 | 11 | 5 |
| 17 | 1 | 1 | 11 | 6 |
| 18 | 1 | 2.5 | 11 | 7 |
| 19 | 1 | 5 | 11 | 8 |
| 20 | 1 | 10 | 11 | 9 |
| 21 | 1 | 25 | 11 | 10 |
| 22 | 1 | 50 | 11 | 11 |
| 23 | 1 | 100 | 11 | 12 |

### Example 5-2 Assessment of Electrophoretic Mobility in Polyacrylamide Gel of the Samples in Each Concentration with Antibody and TCEP

[0941] Similarly to Example 4-3, non-reducing SDS-PAGE was carried out with the antibody samples treated with TCEP in Example 5-1, the gel image was captured, and bands were quantified.

[0942] The gel images are shown in FIGS. 9 to 11. In the gel images, two bands were observed in the sample without (0 mM of) a reducing agent (control; lane 3 in each figure), and the molecular weights of the upper bands correspond to that of the parent antibody. It is highly likely that structural changes such as crosslinking via disulfide bonds of Fabs were caused by cysteine substitution, which resulted in the change in electrophoretic mobility. Thus, the lower band can be considered to correspond to the antibody having one or more engineered disulfide bond(s) formed between the CH1 regions. The results show that most of samples incubated/treated with TCEP showed a higher lower band to upper band ratio, compared to that of an antibody sample without TCEP treatment. The results suggest that incubation of the antibody with a reducing agent such as TCEP could be an effective way to improve or increase the percentage or structural homogeneity of antibody preparation of the S191C variants having an engineered disulfide bond formed at the position 191 of the CH1 region of the antibody.

### Example 6 Assessment of Effect of De-Cysteinylation by Other Reducing Agents to Promote Formation of Disulfide Bonds in Fabs

### Example 6-1 Preparation of Reaction Samples Using 4 Reducing Agents

[0943] Using the antibody produced in Example 1-1, four different reducing agents, namely DTT, Cysteine, GSH, Na₂SO₃, were examined for whether they can promote formation of disulfide bonds in Fabs by inducing de-cysteinylation of capped-cysteine residues that do not form disulfide bond cross-linking.

[0944] DTT (Wako: 040-29223), L-Cysteine (Sigma-Aldrich: 168149), Glutathione (Wako: 077-02011) and Na₂SO₃ (Wako: 198-03412) were dissolved in 25 mM NaCl, 20 mM Na-Phosphate buffer, pH7.0. Na₂SO₃ was adjusted to pH 7 with HCl. The antibody and each reducing agent were mixed to the concentration shown in Table 15, and incubated in 5 mM NaCl, 20 mM Na-Phosphate buffer, pH7.0 at room temperature (RT) overnight. To stop the reduction reaction, the buffer of the mixtures with each reducing agent was changed to the buffer without the reducing agent. Then, the samples were incubated at room temperature overnight for re-oxidation.

TABLE 15
Concentrations of antibody and reducing reagents in each sample

| | Antibody | | Reagents | | |
|---|---|---|---|---|---|
| Sample | conc. | Reagents | Conc. | FIG. | Lane |
| No. | (mM) | name | (mM) | No. | No. |
| 1 [Control] | 20 | None | 0 | 12, 13 | 3 |
| 2 | 20 | DTT | 0.1 | 12 | 4 |
| 3 | 20 | DTT | 1 | 12 | 5 |
| 4 | 20 | DTT | 10 | 12 | 6 |
| 5 | 20 | DTT | 100 | 12 | 7 |
| 6 | 20 | Cysteine | 0.1 | 12 | 8 |
| 7 | 20 | Cysteine | 1 | 12 | 9 |
| 8 | 20 | Cysteine | 10 | 12 | 10 |
| 9 | 20 | Cysteine | 100 | 12 | 11 |
| 10 | 20 | GSH | 0.1 | 13 | 4 |
| 11 | 20 | GSH | 1 | 13 | 5 |
| 12 | 20 | GSH | 10 | 13 | 6 |
| 13 | 20 | GSH | 50 | 13 | 7 |
| 14 | 20 | Na₂SO₃ | 0.01 | 13 | 8 |
| 15 | 20 | Na₂SO₃ | 0.1 | 13 | 9 |
| 16 | 20 | Na₂SO₃ | 1 | 13 | 10 |
| 17 | 20 | Na₂SO₃ | 10 | 13 | 11 |

### Example 6-2 Assessment of Electrophoretic Mobility in Polyacrylamide Gel of the Samples in Each Concentration with Antibody and 4 Reducing Agents

[0945] Similarly to Example 4-3, non-reducing SDS-PAGE was carried out with the antibody samples produced in Example 6-1, the gel image was captured, and bands were quantified.

[0946] The gel images are shown in FIGS. 12 and 13. In the gel images, two bands were observed in the sample without (0 mM of) a reducing agent (control; lane 3 in each figure), and the molecular weights of the upper bands correspond to that of the parent antibody. It is highly likely that structural changes such as crosslinking via disulfide bonds of Fabs were caused by cysteine substitution, which resulted in the change in electrophoretic mobility. Thus, the lower band can be considered to correspond to the antibody having one or more engineered disulfide bond(s) formed between the CH1 regions.

[0947] The results show that samples incubated/treated with the different reducing agents (DTT, Cysteine, GSH, and Na₂SO₃) all showed a higher lower band to upper band ratio, compared to that of an antibody sample without reducing agent treatment. The results suggest that incubation of the antibody with the reducing agent could be an effective way to improve or increase the percentage or structural homogeneity of antibody preparation of the S191C variants having an engineered disulfide bond formed at the position 191 of the CH1 region of the antibody.

### Example 7 Assessment of Effect of De-Cysteinylation by a Reducing Agent Such as 2-MEA and TCEP in Different pH Buffers

### Example 7-1 Preparation of Antibody Samples Treated with 2-MEA and TCEP

[0948] Using the antibody produced in Example 4-1, 2-MEA and TCEP were examined for whether they can promote formation of disulfide bonds in Fabs under various pH conditions.

[0949] 2-MEA (Sigma-Aldrich: M6500) and TCEP (Sigma-Aldrich: C4706) were dissolved in 25 mM NaCl, 20 mM Na-Phosphate buffer, pH7.0. Especially, TCEP was adjusted to pH 7 with NaOH. 20 mg/mL of the antibody was mixed with 1 mM 2-MEA or 0.25 mM TCEP under each pH condition shown in Table 16. The composition of the pH buffer is as follows: 50 mM Acetic Acid pH3.1, 50 mM Acetic Acid adjust to pH4.0 with 1M Tris base, 50 mM Acetic Acid adjust to pH5.0 with 1M Tris base, 25 mM NaCl, 20 mM Na-Phosphate buffer pH6.0, 25 mM NaCl, 20 mM Na-Phosphate buffer pH7.0, 25 mM NaCl, 20 mM Na-Phosphate buffer pH8.0. Mixed samples were incubated in each pH buffer at 37 degrees C. for 2 hours. To stop the reduction reaction, the buffers of the mixtures with reducing agents were changed to the buffers without the reducing agents. Then, the samples were incubated at RT overnight for re-oxidation.

TABLE 16
pH of reaction buffers comprising the antibody
and reducing reagent in each sample

| | Antibody | | pH of | | |
|---|---|---|---|---|---|
| Sample | conc. | Reagents | reaction | FIG. | Lane |
| No. | (mM) | name | buffer | No. | No. |
| 1 [Control] | 20 | None | 3 | 14 | 3 |
| 2 | 20 | 2-MEA | 3 | 14 | 4 |
| 3 | 20 | TCEP | 3 | 14 | 5 |
| 4 [Control] | 20 | None | 4 | 14 | 6 |
| 5 | 20 | 2-MEA | 4 | 14 | 7 |
| 6 | 20 | TCEP | 4 | 14 | 8 |
| 7 [Control] | 20 | None | 5 | 14 | 9 |
| 8 | 20 | 2-MEA | 5 | 14 | 10 |
| 9 | 20 | TCEP | 5 | 14 | 11 |
| 10 [Control] | 20 | None | 6 | 15 | 3 |
| 11 | 20 | 2-MEA | 6 | 15 | 4 |
| 12 | 20 | TCEP | 6 | 15 | 5 |
| 13 [Control] | 20 | None | 7 | 15 | 6 |
| 8 | 20 | 2-MEA | 7 | 15 | 7 |
| 15 | 20 | TCEP | 7 | 15 | 8 |
| 16 [Control] | 20 | None | 8 | 15 | 9 |
| 17 | 20 | 2-MEA | 8 | 15 | 10 |
| 18 | 20 | TCEP | 8 | 15 | 11 |

### Example 7-2 Assessment of Electrophoretic Mobility in Polyacrylamide Gel of the Samples in Each pH Buffer

[0950] Similarly to Example 4-3, non-reducing SDS-PAGE was carried out with the reaction samples produced in Example 7-1, the gel image was captured, and bands were quantified.

[0951] The gel images are shown in FIGS. 14 to 16. In the gel images, two bands were observed in the sample without (0 mM of) a reducing agent (control; lane 3, 6 and 9 in each figure), and the molecular weights of the upper hands correspond to that of the parent antibody. It is highly likely that structural changes such as crosslinking via disulfide bonds of Fabs were caused by cysteine substitution, which resulted in the change in electrophoretic mobility. Thus, the lower band can be considered to correspond to the antibody having one or more engineered disulfide bond(s) formed between the CH1 regions.

[0952] The results show that antibody samples incubated/treated with reducing agents at different pH conditions showed a higher lower band to upper band ratio, compared to that of an antibody sample without reducing agent treatment.

### Example 8 Separation of Crosslinked OKT3.S191C and its Variants by Cation Exchange Chromatography

### Example 8-1 Fractionation of OKT3.S191C by Cation Exchange Chromatography

[0953] Cation exchange chromatography (CIEX) was conducted on a ProPac™ WCX-10 BioLC column, 4 mm×250 mm (Thermo) at a flow rate of 0.5 ml/min on an UltiMate 3000 UHPLC system (Thermo Scientific Dionex). The column temperature was set at 40 degrees C. Eighty microgram of OKT3.S191C (heavy chain: OKT3VH0000-G1T4.S191C (SEQ ID NO: 1428), light chain: OKT3VL0000-KT0 (SEQ ID NO: 1243)) were loaded after the column was equilibrated with 35% mobile phase A (CX-1 pH Gradient Buffer A, pH5.6, Thermo) mixed with 65% mobile phase B (CX-1 pH Gradient Buffer B, pH10.2, Thermo). Then the column was eluted with linear gradient from 65 to 85% mobile phase B for 20 min. Detection was done by UV detector (280 nm). Four times of injections were carried out and a total of 12 fractions were collected between 11 and 17 min, with samples taken at 30-sec intervals (FIG. 17). Each fraction was concentrated and evaluated using non-reducing SDS-PAGE (as described in Example 7-2). Chromatograms were analyzed using Chromeleon™ 6.8 (Thermo Scientific Dionex).

[0954] As shown in the non-reducing SDS-PAGE data (FIG. 18), the acidic peaks contained the non-crosslinked Fabs (upper band), whereas the main peak contained only crosslinked Fabs (lower band). This indicated that the non-crosslinked species were eluted faster (in fraction RA3-6) and the crosslinked Fab can be separated from them using cation exchange chromatography.

### Example 8-2 Fractionation of OKT3.S191C0110 by Cation Exchange Chromatography

[0955] Cation exchange chromatography (CIEX) was conducted on a ProPac™ WCX-10 BioLC column, 4 mm×250 mm (Thermo) at a flow rate of 0.5 ml/min on an UltiMate 3000 UHPLC system (Thermo Scientific Dionex). The column temperature was set at 40 degrees C. Approximately 100 microgram of OKT3.S191C0110 (heavy chain: OKT3VH0000-G1T4.S191C0110 (SEQ ID NO: 1429), light chain: OKT3VL0000-KT0 (SEQ ID NO: 1243)) was loaded after the column was equilibrated with 35% mobile phase A (CX-1 pH Gradient Buffer A, pH5.6, Thermo) mixed with 65% mobile phase B (CX-1 pH Gradient Buffer B, pH10.2, Thermo). Then the column was eluted with linear gradient from 65 to 100% mobile phase B for 20 min. Detection was done by UV detector (280 nm). Three times of injections were carried out and a total of 40 fractions were collected between 10 and 30 min, with samples taken at 30-sec intervals (FIG. 19). Each fraction was concentrated and evaluated using non-reducing SDS-PAGE (described in Example 7-2). Chromatograms were analyzed using Chromeleon™ 6.8 (Thermo Scientific Dionex).

[0956] As shown in the SDS-PAGE data (FIG. 20), the antibody species with non-crosslinked Fabs (upper band) was observed in the acidic peaks and the basic peaks, whereas the main peak contained only the antibody species with crosslinked Fabs (lower band). This indicates that additional charge mutations affected the surface charge in the antibody species with non-crosslinked Fab. The cation exchange chromatography is a useful tool to purify the antibody with crosslinked Fabs.

### Example 9

[0957] Assessment of Antibodies Having Additional Disulfide Bond and Charged Mutations within Fab Region

### Example 9-1 Production of Antibodies Having Additional Disulfide Bond and Charged Mutations within Fab Region

[0958] One disulfide bond and charged mutations were introduced in the heavy chain of an anti-human CD3 antibody, OKT3 (heavy chain: OKT3VH0000-G1T4 (SEQ ID NO: 1242), light chain: OKT3VL0000-KT0 (SEQ ID NO: 1243)).

[0959] An amino acid residue structurally exposed to the surface of the OKT3 heavy chain constant region (G1T4, SEQ ID NO: 1244) was substituted with cysteine to produce the variant of OKT3 heavy chain constant region (G1T4.S191C, SEQ ID NO: 1245). In addition, CH1-CH1 interface amino acid residues structurally exposed to the surface of G1T4.S191C were substituted with charged amino acids (FIG. 62A) to produce the variants of G1T4.S191C shown in Table 82. These heavy chain constant regions were each linked with the OKT3 heavy chain variable region (OKT3VH0000, SEQ ID NO: 1246) to produce the OKT3 heavy chain variants, and expression vectors encoding the corresponding genes were produced by a method known in the art.

TABLE 82
G1T4.S191C variants with charged amino acid substitution

| Variants of | Charged mutations |
|---|---|
| heavy chain | made to G1T4.S191C |
| constant region | (EU numbering) |
| G1T4.S191C0150 | G137K/G138K/L193E |
| G1T4.S191C0151 | G137K/G138K/G194E |
| G1T4.S191C0152 | G137K/G138K/T195E |
| G1T4.S191C0153 | S136K/G138K/L193E |
| G1T4.S191C0154 | S136K/G138K/G194E |
| G1T4.S191C0155 | S136K/G138K/T195E |
| G1T4.S191C0156 | S136K/G137K/L193E |
| G1T4.S191C0157 | S136K/G137K/G194E |
| G1T4.S191C0158 | S136K/G137K/T195E |
| G1T4.S191C0159 | G137R/G138R/L193D |
| G1T4.S191C0160 | G137R/G138R/G194D |
| G1T4.S191C0161 | G137R/G138R/T195D |
| G1T4.S191C0162 | S136R/G138R/L193D |
| G1T4.S191C0163 | S136R/G138R/G194D |
| G1T4.S191C0164 | S136R/G138R/T195D |
| G1T4.S191C0165 | S136R/G137R/L193D |
| G1T4.S191C0166 | S136R/G137R/G194D |
| G1T4.S191C0167 | S136R/G137R/T195D |
| G1T4.S191C0168 | G137K/G138K/L193D |
| G1T4.S191C0169 | G137K/G138K/G194D |
| G1T4.S191C0170 | G137K/G138K/T195D |
| G1T4.S191C0171 | S136K/G138K/L193D |
| G1T4.S191C0172 | S136K/G138K/G194D |
| G1T4.S191C0173 | S136K/G138K/T195D |
| G1T4.S191C0174 | S136K/G137K/L193D |
| G1T4.S191C0175 | S136K/G137K/G194D |
| G1T4.S191C0176 | S136K/G137K/T195D |
| G1T4.S191C0177 | G137R/G138R/L193E |
| G1T4.S191C0178 | G137R/G138R/G194E |
| G1T4.S191C0179 | G137R/G138R/T195E |
| G1T4.S191C0180 | S136R/G138R/L193E |
| G1T4.S191C0181 | S136R/G138R/G194E |
| G1T4.S191C0182 | S136R/G138R/T195E |
| G1T4.S191C0183 | S136R/G137R/L193E |
| G1T4.S191C0184 | S136R/G137R/G194E |
| G1T4.S191C0185 | S136R/G137R/T195E |
| G1T4.S191C0186 | S136K/L193D |
| G1T4.S191C0187 | S136K/L193E |
| G1T4.S191C0188 | S136R/L193D |
| G1T4.S191C0189 | S136R/L193E |
| G1T4.S191C0190 | G137K/L193D |
| G1T4.S191C0191 | G137K/L193E |
| G1T4.S191C0192 | G137R/L193D |
| G1T4.S191C0193 | G137R/L193E |
| G1T4.S191C0194 | G138K/L193D |
| G1T4.S191C0195 | G138K/L193E |
| G1T4.S191C0196 | G138R/L193D |
| G1T4.S191C0197 | G138R/L193E |

[0960] The OKT3 heavy chain variants produced above were combined with the OKT3 light chain. The OKT3 variants shown in Table 83 were expressed by transient expression using Expi293 cells (Life technologies) by a method known in the art, and purified with Protein A by a method known in the art. In this Example, OKT3 is called “parent antibody”, OKT3.S191C is called “S191C variant”, and its variants are called “charged variants”.

TABLE 83
OKT3 variants with cysteine and charged amino acid substitution

| | Heavy | Heavy | |
|---|---|---|---|
| | chain | chain | |
| | variable | constant | Light |
| | region | region | T chain |
| Name of OKT3 | SEQ | (SEQ | SEQ |
| variants | ID NO: | ID NO) | ID NO: |
| OKT3 | 1246 | G1T4 | 1243 |
| | | (SEQ ID NO: 1244) | |
| OKT3.S191C | 1246 | G1T4.S191C | 1243 |
| | | (SEQ ID NO: 1245) | |
| OKT3.S191C0150 | 1246 | G1T4.S191C0150 | 1243 |
| OKT3.S191C0151 | 1246 | G1T4.S191C0151 | 1243 |
| OKT3.S191C0152 | 1246 | G1T4.S191C0152 | 1243 |
| OKT3.S191C0153 | 1246 | G1T4.S191C0153 | 1243 |
| OKT3.S191C0154 | 1246 | G1T4.S191C0154 | 1243 |
| OKT3.S191C0155 | 1246 | G1T4.S191C0155 | 1243 |
| OKT3.S191C0156 | 1246 | G1T4.S191C0156 | 1243 |
| OKT3.S191C0157 | 1246 | G1T4.S191C0157 | 1243 |
| OKT3.S191C0158 | 1246 | G1T4.S191C0158 | 1243 |
| OKT3.S191C0159 | 1246 | G1T4.S191C0159 | 1243 |
| OKT3.S191C0160 | 1246 | G1T4.S191C0160 | 1243 |
| OKT3.S191C0161 | 1246 | G1T4.S191C0161 | 1243 |
| OKT3.S191C0162 | 1246 | G1T4.S191C0162 | 1243 |
| OKT3.S191C0163 | 1246 | G1T4.S191C0163 | 1243 |
| OKT3.S191C0164 | 1246 | G1T4.S191C0164 | 1243 |
| OKT3.S191C0165 | 1246 | G1T4.S191C0165 | 1243 |
| OKT3.S191C0166 | 1246 | G1T4.S191C0166 | 1243 |
| OKT3.S191C0167 | 1246 | G1T4.S191C0167 | 1243 |
| OKT3.S191C0168 | 1246 | G1T4.S191C0168 | 1243 |
| OKT3.S191C0169 | 1246 | G1T4.S191C0169 | 1243 |
| OKT3.S191C0170 | 1246 | G1T4.S191C0170 | 1243 |
| OKT3.S191C0171 | 1246 | G1T4.S191C0171 | 1243 |
| OKT3.S191C0172 | 1246 | G1T4.S191C0172 | 1243 |
| OKT3.S191C0173 | 1246 | G1T4.S191C0173 | 1243 |
| OKT3.S191C0174 | 1246 | G1T4.S191C0174 | 1243 |
| OKT3.S191C0175 | 1246 | G1T4.S191C0175 | 1243 |
| OKT3.S191C0176 | 1246 | G1T4.S191C0176 | 1243 |
| OKT3.S191C0177 | 1246 | G1T4.S191C0177 | 1243 |
| OKT3.S191C0178 | 1246 | G1T4.S191C0178 | 1243 |
| OKT3.S191C0179 | 1246 | G1T4.S191C0179 | 1243 |
| OKT3.S191C0180 | 1246 | G1T4.S191C0180 | 1243 |
| OKT3.S191C0181 | 1246 | G1T4.S191C0181 | 1243 |
| OKT3.S191C0182 | 1246 | G1T4.S191C0182 | 1243 |
| OKT3.S191C0183 | 1246 | G1T4.S191C0183 | 1243 |
| OKT3.S191C0184 | 1246 | G1T4.S191C0184 | 1243 |
| OKT3.S191C0185 | 1246 | G1T4.S191C0185 | 1243 |
| OKT3.S191C0186 | 1246 | G1T4.S191C0186 | 1243 |
| OKT3.S191C0187 | 1246 | G1T4.S191C0187 | 1243 |
| OKT3.S191C0188 | 1246 | G1T4.S191C0188 | 1243 |
| OKT3.S191C0189 | 1246 | G1T4.S191C0189 | 1243 |
| OKT3.S191C0190 | 1246 | G1T4.S191C0190 | 1243 |
| OKT3.S191C0191 | 1246 | G1T4.S191C0191 | 1243 |
| OKT3.S191C0192 | 1246 | G1T4.S191C0192 | 1243 |
| OKT3.S191C0193 | 1246 | G1T4.S191C0193 | 1243 |
| OKT3.S191C0194 | 1246 | G1T4.S191C0194 | 1243 |
| OKT3.S191C0195 | 1246 | G1T4.S191C0195 | 1243 |
| OKT3.S191C0196 | 1246 | G1T4.S191C0196 | 1243 |
| OKT3.S191C0197 | 1246 | G1T4.S191C0197 | 1243 |

### Example 9-2 Assessment of Electrophoretic Mobility in Polyacrylamide Gel of Antibodies Having Additional Disulfide Bond and Charged Mutations within Fab Region

[0961] Similarly to Example 1-2, non-reducing SDS-PAGE was carried out with the charged variants produced in Example 9-1, the gel image was captured, and bands were quantified.

[0962] In the gel images, two bands were observed in S191C variant, and the molecular weight of the upper bands was similar to that of the parent antibody. The ratio of the lower bands to upper bands are shown in Table 84. Among charged variants, most of them showed higher ratio of lower bands to upper bands, compared to S191C variants. It is highly likely that structural changes such as crosslinking via disulfide bond of Fabs were caused by cysteine substitution, which resulted in the change in electrophoretic mobility. Thus, additional charged mutations to S191C variant are likely to enhance crosslinking of Fabs.

TABLE 84
The ratio of the lower bands to upper bands of OKT3 variants
with cysteine and charged amino acid substitution

| | Ratio of |
|---|---|
| Name of OKT3 | lower band to |
| variants | upper band (%) |
| OKT3 | 0 |
| OKT3.S191C | 65.4 |
| OKT3.S191C0150 | 70.0 |
| OKT3.S191C0151 | 58.5 |
| OKT3.S191C0152 | 66.5 |
| OKT3.S191C0153 | 70.7 |
| OKT3.S191C0154 | 56.7 |
| OKT3.S191C0155 | 65.9 |
| OKT3.S191C0156 | 70.2 |
| OKT3.S191C0157 | 71.6 |
| OKT3.S191C0158 | 68.5 |
| OKT3.S191C0159 | 68.9 |
| OKT3.S191C0160 | 68.1 |
| OKT3.S191C0161 | 79.1 |
| OKT3.S191C0162 | 69.6 |
| OKT3.S191C0163 | 63.3 |
| OKT3.S191C0164 | 70.8 |
| OKT3.S191C0165 | 76.7 |
| OKT3.S191C0166 | 75.6 |
| OKT3.S191C0167 | 68.0 |
| OKT3.S191C0168 | 66.2 |
| OKT3.S191C0169 | 58.8 |
| OKT3.S191C0170 | 74.5 |
| OKT3.S191C0171 | 72.9 |
| OKT3.S191C0172 | 64.0 |
| OKT3.S191C0173 | 69.1 |
| OKT3.S191C0174 | 62.1 |
| OKT3.S191C0175 | 70.4 |
| OKT3.S191C0176 | 89.8 |
| OKT3.S191C0177 | 76.7 |
| OKT3.S191C0178 | 86.3 |
| OKT3.S191C0179 | 82.2 |
| OKT3.S191C0180 | 80.5 |
| OKT3.S191C0181 | 76.0 |
| OKT3.S191C0182 | 78.8 |
| OKT3.S191C0183 | 78.5 |
| OKT3.S191C0184 | 80.6 |
| OKT3.S191C0185 | 83.5 |
| OKT3.S191C0186 | 75.7 |
| OKT3.S191C0187 | 81.6 |
| OKT3.S191C0188 | 68.5 |
| OKT3.S191C0189 | 83.4 |
| OKT3.S191C0190 | 78.0 |
| OKT3.S191C0191 | 72.5 |
| OKT3.S191C0192 | 80.6 |
| OKT3.S191C0193 | 76.3 |
| OKT3.S191C0194 | 84.8 |
| OKT3.S191C0195 | 79.3 |
| OKT3.S191C0196 | 82.7 |
| OKT3.S191C0197 | 85.5 |

### Example 9-3 Assessment of Peak Separation of Antibodies Having Additional Disulfide Bond and Charged Mutations within Fab Region by Cation Exchange Chromatography

[0963] Cation exchange chromatography (CIEX) was conducted on a ProPac™ WCX-10 BioLC column, 4 mm×250 mm (Thermo) at a flow rate of 0.5 ml/min on an Alliance HPLC system (Waters). Column temperature was set at 40 degrees C. Eighty microgram of charged variants produced in Example 9-1 were loaded after column was equilibrated with 35% mobile phase A (CX-1 pH Gradient Buffer A, pH5.6, Thermo) mixed with 65% mobile phase B (CX-1 pH Gradient Buffer B, pH10.2, Thermo). Then the column was eluted with linear gradient from 65 to 100% mobile phase B for 35 min. Detection was done by UV detector (280 nm). Chromatograms of CIEX are shown in FIGS. 58 and 59.

[0964] In FIGS. 58 and 59, similar peak patterns to FIG. 19, which could separate crosslinked and non-crosslinked Fabs, were observed in some charged variants. It is highly likely that additional charged mutations to S191C variant can enhance not only crosslinking of Fabs but also separation between crosslinked and non-crosslinked Fabs by CIEX. See also FIG. 62B.

### Example 10

[0965] Assessment of Different Antibodies Having Additional Disulfide Bond and Charged Mutations within Fab Region

### Example 10-1 Production of Different Antibodies Having Additional Disulfide Bond and Charged Mutations within Fab Region

[0966] One disulfide bond and charged mutations were introduced in the heavy chain of an anti-human CD3 antibody, OKT3 (heavy chain: OKT3VH0000-G1T4 (SEQ ID NO: 1242), light chain: OKT3VL0000-KT0 (SEQ ID NO: 1243)). Similarly, one disulfide bond and charge mutations were introduced in the heavy chain of an anti-human IL-6R antibody, MRA (heavy chain: MRAH-G1T4 (SEQ ID NO: 15), light chain: MRAL-k0 (SEQ ID NO: 16)).

[0967] An amino acid residue structurally exposed to the surface of the OKT3 and MRA heavy chain constant region (G1T4, SEQ ID NO: 1244) was substituted with cysteine to produce the variant of OKT3 heavy chain constant region (G1T4.S191C, SEQ ID NO: 1245). In addition, CH1-CH1 interface amino acid residues structurally exposed to the surface of G1T4.S191C were substituted with charged amino acids (FIG. 62A) to produce the variants of G1T4.S191C shown in Table 85. These heavy chain constant regions were each linked with the OKT3 heavy chain variable region (OKT3VH0000, SEQ ID NO: 1246) and MRA heavy chain variable region (MRAH, SEQ ID NO: P17) respectively to produce the OKT3 and MRA heavy chain variants, and expression vectors encoding the corresponding genes were produced by a method known in the art.

TABLE 85
G1T4.S191C variants with charged amino acid substitution

| Variants of heavy | Charged mutations |
|---|---|
| chain constant | made to G1T4.S191C |
| region | (EU numbering) |
| G1T4.S191C0159 | G137R/G138R/L193D |
| G1T4.S191C0161 | G137R/G138R/T195D |
| G1T4.S191C0162 | S136R/G138R/L193D |
| G1T4.S191C0164 | S136R/G138R/T195D |
| G1T4.S191C0165 | S136R/G137R/L193D |
| G1T4.S191C0167 | S136R/G137R/T195D |
| G1T4.S191C0177 | G137R/G138R/L193E |
| G1T4.S191C0179 | G137R/G138R/T195E |
| G1T4.S191C0180 | S136R/G138R/L193E |
| G1T4.S191C0182 | S136R/G138R/T195E |
| G1T4.S191C0183 | S136R/G137R/L193E |
| G1T4.S191C0185 | S136R/G137R/T195E |

[0968] The OKT3 and MRA heavy chain variants produced above were combined with the OKT3 and MRA light chains respectively. The OKT3 and MRA variants shown in Table 86 were expressed by transient expression using Expi293 cells (Life technologies) by a method known in the art, and purified with Protein A by a method known in the art. In this Example, OKT3 and MRA are called “parent antibody”, OKT3.S191C and MRA.S191C are called “S191C variant”, and their variants are called “charged variants”.

TABLE 86
OKT3 and MRA variants with cysteine
and charged amino acid substitution

| | | Heavy | Heavy | |
|---|---|---|---|---|
| | | chain | chain | |
| | | variable | constant | Light |
| | | region | region | chain |
| Original | Name of OKT3 | SEQ | (SEQ | SEQ |
| antibody | variants | ID NO: | ID NO) | ID NO: |
| OKT3 | OKT3 | 1246 | G1T4 | 1243 |
| | | | (SEQ ID NO: 1244) | |
| OKT3 | OKT3.S191C | 1246 | G1T4.S191C | 1243 |
| | | | (SEQ ID NO: 1245) | |
| OKT3 | OKT3.S191C0159 | 1246 | G1T4.S191C0159 | 1243 |
| OKT3 | OKT3.S191C0161 | 1246 | G1T4.S191C0161 | 1243 |
| OKT3 | OKT3.S191C0162 | 1246 | G1T4.S191C0162 | 1243 |
| OKT3 | OKT3.S191C0164 | 1246 | G1T4.S191C0164 | 1243 |
| OKT3 | OKT3.S191C0165 | 1246 | G1T4.S191C0165 | 1243 |
| OKT3 | OKT3.S191C0167 | 1246 | G1T4.S191C0167 | 1243 |
| OKT3 | OKT3.S191C0177 | 1246 | G1T4.S191C0177 | 1243 |
| OKT3 | OKT3.S191C0179 | 1246 | G1T4.S191C0179 | 1243 |
| OKT3 | OKT3.S191C0180 | 1246 | G1T4.S191C0180 | 1243 |
| OKT3 | OKT3.S191C0182 | 1246 | G1T4.S191C0182 | 1243 |
| OKT3 | OKT3.S191C0183 | 1246 | G1T4.S191C0183 | 1243 |
| OKT3 | OKT3.S191C0185 | 1246 | G1T4.S191C0185 | 1243 |
| MRA | MRA | 17 | G1T4 | 16 |
| | | | (SEQ ID NO: 1244) | |
| MRA | MRA.S191C | 17 | G1T4.S191C | 16 |
| | | | (SEQ ID NO: 1245) | |
| MRA | MRA.S191C0159 | 17 | G1T4.S191C0159 | 16 |
| MRA | MRA.S191C0161 | 17 | G1T4.S191C0161 | 16 |
| MRA | MRA.S191C0162 | 17 | G1T4.S191C0162 | 16 |
| MRA | MRA.S191C0164 | 17 | G1T4.S191C0164 | 16 |
| MRA | MRA.S191C0165 | 17 | G1T4.S191C0165 | 16 |
| MRA | MRA.S191C0167 | 17 | G1T4.S191C0167 | 16 |
| MRA | MRA.S191C0177 | 17 | G1T4.S191C0177 | 16 |
| MRA | MRA.S191C0179 | 17 | G1T4.S191C0179 | 16 |
| MRA | MRA.S191C0180 | 17 | G1T4.S191C0180 | 16 |
| MRA | MRA.S191C0182 | 17 | G1T4.S191C0182 | 16 |
| MRA | MRA.S191C0183 | 17 | G1T4.S191C0183 | 16 |
| MRA | MRA.S191C0185 | 17 | G1T4.S191C0185 | 16 |

### Example 10-2 Assessment of Electrophoretic Mobility in Polyacrylamide Gel of Different Antibodies Having Additional Disulfide Bond and Charged Mutations within Fab Region

[0969] It was examined whether the antibodies produced in Example 10-1 show a different electrophoretic mobility in polyacrylamide gel by non-reducing SDS-PAGE.

[0970] Sample Buffer Solution (2ME-) (×4) (Wako; 198-13282) was used for preparation of electrophoresis samples. The samples were treated for 10 minutes under the condition of specimen concentration 75 microgram/mL and 70 degrees C., and then subjected to non-reducing SDS-PAGE. In non-reducing SDS-PAGE, electrophoresis was carried out for 90 minutes at 126 V, using 4% SDS-PAGE mini 15 well 1.0 mm 15 well (TEFCO; Cat #01-052-6). Then, the gel was stained with CBB stain, the gel image was captured with ChemiDocTouchMP (BIORAD), and the bands were quantified with Image Lab (BIORAD).

[0971] In the gel images, two bands were observed in S191C variant, and the molecular weight of the upper bands was similar to that of the parent antibody. The ratio of the lower bands to upper bands are shown in Table 87 and plotted in a scatter diagram shown in FIG. 60. Good correlation between the ratio of lower bands to upper bands in OKT3 and MRA was observed. Thus, additional charged mutations to S191C variant are likely to enhance crosslinking of Fabs of not only OKT3 but also other antibodies binding to other antigen such as MRA.

TABLE 87
The ratio of the lower bands to upper bands of OKT3 and MRA
variants with cysteine and charged amino acid substitution

| | | Ratio of |
|---|---|---|
| Original | Name of OKT3 | lower band to |
| antibody | variants | upper band (%) |
| OKT3 | OKT3 | 0 |
| OKT3 | OKT3.S191C | 72.4 |
| OKT3 | OKT3.S191C0159 | 80.9 |
| OKT3 | OKT3.S191C0161 | 83.0 |
| OKT3 | OKT3.S191C0162 | 83.3 |
| OKT3 | OKT3.S191C0164 | 78.7 |
| OKT3 | OKT3.S191C0165 | 81.0 |
| OKT3 | OKT3.S191C0167 | 79.6 |
| OKT3 | OKT3.S191C0177 | 80.5 |
| OKT3 | OKT3.S191C0179 | 79.9 |
| OKT3 | OKT3.S191C0180 | 83.9 |
| OKT3 | OKT3.S191C0182 | 77.8 |
| OKT3 | OKT3.S191C0183 | 88.0 |
| OKT3 | OKT3.S191C0185 | 84.8 |
| MRA | MRA | 0 |
| MRA | MRA.S191C | 70.8 |
| MRA | MRA.S191C0159 | 80.3 |
| MRA | MRA.S191C0161 | 78.8 |
| MRA | MRA.S191C0162 | 81.6 |
| MRA | MRA.S191C0164 | 77.7 |
| MRA | MRA.S191C0165 | 78.0 |
| MRA | MRA.S191C0167 | 76.7 |
| MRA | MRA.S191C0177 | 80.5 |
| MRA | MRA.S191C0179 | 78.9 |
| MRA | MRA.S191C0180 | 81.4 |
| MRA | MRA.S191C0182 | 82.7 |
| MRA | MRA.S191C0183 | 88.9 |
| MRA | MRA.S191C0185 | 80.9 |

### Example 10-3 Assessment of Peak Separation of Different Antibodies Having Additional Disulfide Bond and Charged Mutations within Fab Region by Cation Exchange Chromatography

[0972] Cation exchange chromatography (CIEX) was conducted on a ProPac™ WCX-10 BioLC column, 4 mm×250 mm (Thermo) at a flow rate of 0.5 ml/min on an Alliance HPLC system (Waters). Column temperature was set at 40 degrees C. Eighty microgram of charged variants produced in Example 10-1 were loaded after column was equilibrated with 45% mobile phase A (CX-1 pH Gradient Buffer A, pH5.6, Thermo) mixed with 55% mobile phase B (CX-1 pH Gradient Buffer B, pH10.2, Thermo). Then the column was eluted with linear gradient from 55 to 95% mobile phase B for 40 min. Detection was done by UV detector (280 nm). Chromatograms of CIEX are shown in FIGS. 61A and 61B.

[0973] In FIGS. 61A and 61B, similar peak patterns between OKT3 and MRA variants were observed. Thus, additional charged mutations to S191C variant are likely to enhance separation between crosslinked and non-crosslinked Fabs of not only OKT3 but also other antibodies binding to other antigen such as MRA by CIEX.

### Reference Example 1 Concept of Fab-Crosslinked Antibody

[0974] Agonist antibodies are superior in properties such as stability, pharmacokinetics, and production methods compared to natural ligands and their fusion proteins, and their pharmaceutical development is under way. However, in general, agonist antibodies with strong activity are more difficult to obtain than mere binding or neutralizing antibodies. A solution to this problem is therefore being wanted.

[0975] Properties needed for an agonist antibody may depend on the type of the ligand. For agonist antibodies against the TNF receptor superfamily, typified by Death receptor (DR), OX40, 4-1BB, CD40, and such, it has been reported that multimerization of antibody or ligand contributes to the activation. As techniques for increasing this effect, use of natural ligands, crosslinking by anti-Fc antibodies, crosslinking via Fc gamma Rs, multimerization of antibody binding domains, multimerization via antibody Fc, and such have been reported to enhance the agonist activity. It is also known that, for certain types of antigens, adjustment of the distance of antigen-binding sites using antibody Fab structure or scFv leads to enhancement of the agonist activity regardless of multimerization.

[0976] As another technique, an agonist antibody against a cytokine receptor which is a bispecific antibody capable of binding to different epitopes within the same antigen has been reported. Moreover, a method of improving agonist activity by using chemical conjugation to crosslink two different Fabs in a similar manner has been reported.

[0977] More methods besides those mentioned above for improving the activity of agonist antibodies are wanted. However, no simple method to achieve this has been reported. Thus, the inventors developed a method for crosslinking Fabs with each other through introducing minimum mutations, and demonstrated that this actually enhanced the agonist activity, thereby completing the invention. An exemplifying embodiment is shown in FIG. 21.

### Reference Example 2 Production of Expression Vectors for Modified Antibodies, and Expression and Purification of Modified Antibodies

[0978] An antibody gene inserted in an expression vector for animal cells was subjected to amino acid residue sequence substitution by a method known to the person skilled in the art using PCR, the In-Fusion Advantage PCR cloning kit (TAKARA), or such, to construct an expression vector for a modified antibody. The nucleotide sequence of the resulting expression vector was determined by a method known to the person skilled in the art. The produced expression vector was transiently introduced into FreeStyle293 (registered trademark) or Expi293 (registered trademark) cells (Invitrogen) and the cells were allowed to express the modified antibody into culture supernatant. The modified antibody was purified from the obtained culture supernatant by a method known to the person skilled in the art using rProtein A Sepharose (registered trademark) Fast Flow (GE Healthcare). Absorbance at 280 nm was measured using a spectrophotometer. An absorption coefficient was calculated from the measured value using the PACE method and used to calculate the antibody concentration (Protein Science 1995; 4:2411-2423).

[0979] The amount of aggregates of the modified antibody was analyzed by a method known to the person skilled in the art using Agilent 1260 Infinity (registered trademark) (Agilent Technologies) for HPLC and G3000SW_{XL} (TOSOH) as a gel filtration chromatography column. The concentration of the purified antibody was 0.1 mg/mL, and 10 microliter of the antibody was injected.

[0980] Antibodies prepared by this method (anti-CD3 epsilon antibodies, anti-CD28 antibodies, and anti-CD3 epsilon×anti-CD28 bispecific antibodies) are shown in Table 17.

TABLE 17
Antibody names, SEQ ID NOs

| | SEQ ID NO: | | | |
|---|---|---|---|---|
| Antibody | Heavy | Light | Heavy | Light |
| name | chain 1 | chain 1 | chain 2 | chain 2 |
| CD3-G4s | 1 | 10 | — | — |
| CD3-G4sHH | 2 | 10 | — | — |
| CD3-G4sLL | 1 | 11 | — | — |
| CD3-G1s | 4 | 10 | — | — |
| OKT3-G1s | 5 | 12 | — | — |
| CD28-G1 | 6 | 13 | — | — |
| CD3-G1sLL | 4 | 11 | — | — |
| CD3-G1sHH | 7 | 10 | — | — |
| CD3//CD28-G1s | 4 | 10 | 6 | 13 |
| CD3//CD28-G1sLL | 4 | 11 | 6 | 14 |
| CD3//CD28-G1sHH | 7 | 10 | 9 | 13 |
| CD3//CD28-G1sLH | 4 | 11 | 9 | 13 |
| CD3//CD28-G1sHL | 7 | 10 | 6 | 14 |
| OKT3//CD28-G1s | 5 | 12 | 6 | 13 |
| OKT3//CD28-G1sHH | 8 | 12 | 9 | 13 |
| OKT3//CD28-G1sHL | 8 | 12 | 6 | 14 |

HH: position 191 (EU numbering) was altered to Cys in the two H chain constant regions
LL: position 126 (EU numbering) was altered to Cys in the two L chain constant regions
HL, LH: position 191 (EU numbering) was altered to Cys in one H chain constant region, and position 126 (EU numbering) was altered to Cys in one L chain constant region

### Reference Example 3 Preparation of Bispecific Antibodies

[0981] The purified antibody was dialyzed into TBS (WAKO) buffer and its concentration was adjusted to 1 mg/mL. As a 10× reaction buffer, 250 mM 2-MEA (SIGMA) was prepared. Two different homodimeric antibodies prepared in Reference Example 2 were mixed in equal amount. To this mixture, a 1/10 volume of the 10× reaction buffer was added and mixed. The mixture was allowed to stand at 37 degrees C. for 90 minutes. After the reaction, the mixture was dialyzed into TBS to obtain a solution of a bispecific antibody in which the above two different antibodies were heterodimerized. The antibody concentration was measured by the above-mentioned method, and the antibody was subjected to subsequent experiments.

### Reference Example 4 Assessment of Agonist Activity

### Reference Example 4-1 Preparation of Jurkat Cell Suspension

[0982] Jurkat cells (TCR/CD3 Effector Cells (NFAT), Promega) were collected from flasks. The cells were washed with Assay Buffer (RPMI 1640 medium (Gibco), 10% FBS (HyClone), 1% MEM Non Essential Amino Acids (Invitrogen), and 1 mM Sodium Pyruvate (Invitrogen)), and then suspended at 3×10⁶ cells/mL in Assay Buffer. This suspension of Jurkat cells was subjected to subsequent experiments.

### Reference Example 4-2 Preparation of Luminescence Reagent Solution

[0983] 100 mL of Bio-Glo Luciferase Assay Buffer (Promega) was added to the bottle of Bio-Glo Luciferase Assay Substrate (Promega), and mixed by inversion. The bottle was protected from light and frozen at −20 degrees C. This luminescence reagent solution was subjected to subsequent experiments.

### Reference Example 4-3 T Cell Activation Assay

[0984] T cell activation by agonist signaling was assessed based on the fold change of luciferase luminescence. The aforementioned Jurkat cells are cells transformed with a luciferase reporter gene having a NFAT responsive sequence. When the cells are stimulated by an anti-TCR/CD3 antibody, the NFAT pathway is activated via intracellular signaling, thereby inducing luciferase expression. The Jurkat cells suspension prepared as described above was added to a 384-well flat-bottomed white plate at 10 microliter per well (3×10⁴ cells/well). Next, the antibody solution prepared at each concentration (150, 15, 1.5, 0.15, 0.015, 0.0015, 0.00015, 0.000015 nM) was added at 20 microliter per well. This plate was allowed to stand in a 5% CO₂ incubator at 37 degrees C. for 24 hours. After the incubation, the luminescence reagent solution was thawed, and 30 microliter of the solution was added to each well. The plate was then allowed to stand at room temperature for 10 minutes. Luciferase luminescence in each well of the plate was measured using a luminometer.

[0985] As a result, modified molecules with an additional disulfide bond linking the Fab-Fab of anti-CD3 epsilon antibody showed varied CD3-mediated signaling compared to the wild-type molecule (unmodified molecule) as shown in FIGS. 22 and 23. Furthermore, as shown in FIGS. 24 and 25, modified molecules of a bispecific antibody composed of an anti-CD3 epsilon antibody and an anti-CD28 antibody with an additional disulfide bond linking the Fab-Fab also showed largely varied CD3- and/or CD28-mediated signaling compared to the wild-type molecule. These results suggest that introducing modifications of the present invention can enhance or diminish agonist activity possessed by antigen-binding molecules such as antibodies.

### Reference Example 5 Assessment of Antibodies Having Cysteine Substitution at Various Positions in the Heavy Chain

### Reference Example 5-1 Assessment of Antibodies Having Cysteine Substitution at Various Positions in the Heavy Chain

[0986] The heavy chain variable region and constant region of an anti-human IL6R neutralizing antibody, MRA (heavy chain: MRAH-G1T4 (SEQ ID NO: 15), light chain: MRAL-k0 (SEQ ID NO: 16)) were subjected to a study in which an arbitrary amino acid residue structurally exposed to the surface was substituted with cysteine.

[0987] Amino acid residues within the heavy chain variable region of MRA (MRAH, SEQ ID NO: 17) were substituted with cysteine to produce variants of the heavy chain variable region of MRA shown in Table 18. These variants of the heavy chain variable region of MRA were each linked with the heavy chain constant region of MRA (G1T4, SEQ ID NO: 18) to produce variants of the heavy chain of MRA, and expression vectors encoding the corresponding genes were produced by a method known to the person skilled in the art.

[0988] In addition, amino acid residues within the heavy chain constant region of MRA (G1T4, SEQ ID NO: 18) were substituted with cysteine to produce variants of the heavy chain constant region of MRA shown in Table 19. These variants of the heavy chain constant region of MRA were each linked with the heavy chain variable region of MRA (MRAH, SEQ ID NO: 17) to produce variants of the heavy chain of MRA, and expression vectors encoding the corresponding genes were produced by a method known to the person skilled in the art.

[0989] The MRA heavy chain variants produced above were combined with the MRA light chain. The resultant MRA variants shown in Table 20 were expressed by transient expression using FreeStyle293 cells (Invitrogen) or Expi293 cells (Life technologies) by a method known to the person skilled in the art, and purified with Protein A by a method known to the person skilled in the art.

TABLE 18
Variants of MRA heavy chain variable region
and position of cysteine substitution

| Variant of MRA | Position of cysteine | |
|---|---|---|
| heavy chain | substitution | SEQ |
| variable region | (Kabat numbering) | ID NO: |
| MRAH.Q5C | 5 | 21 |
| MRAH.E6C | 6 | 22 |
| MRAH.S7C | 7 | 23 |
| MRAH.G8C | 8 | 24 |
| MRAH.P9C | 9 | 25 |
| MRAH.G10C | 10 | 26 |
| MRAH.L11C | 11 | 27 |
| MRAH.V12C | 12 | 28 |
| MRAH.R13C | 13 | 29 |
| MRAH.P14C | 14 | 30 |
| MRAH.S15C | 15 | 31 |
| MRAH.Q16C | 16 | 32 |
| MRAH.T17C | 17 | 33 |
| MRAH.L18C | 18 | 34 |
| MRAH.S19C | 19 | 35 |
| MRAH.L20C | 20 | 36 |
| MRAH.T21C | 21 | 37 |
| MRAH.T23C | 23 | 38 |
| MRAH.S25C | 25 | 39 |
| MRAH.G26C | 26 | 40 |
| MRAH.S28C | 28 | 41 |
| MRAH.T30C | 30 | 42 |
| MRAH.R66C | 66 | 43 |
| MRAH.V67C | 67 | 44 |
| MRAH.T68C | 68 | 45 |
| MRAH.L70C | 70 | 46 |
| MRAH.D72C | 72 | 47 |
| MRAH.T73C | 73 | 48 |
| MRAH.S74C | 74 | 49 |
| MRAH.K75C | 75 | 50 |
| MRAH.N76C | 76 | 51 |
| MRAH.Q77C | 77 | 52 |
| MRAH.S79C | 79 | 53 |
| MRAH.L80C | 80 | 54 |
| MRAH.R81C | 81 | 55 |
| MRAH.L82C | 82 | 56 |
| MRAH.S82aC | 82a | 57 |
| MRAH.S82bC | 82b | 58 |
| MRAH.V82cC | 82c | 59 |
| MRAH.S112C | 112 | 60 |
| MRAH.S113C | 113 | 61 |
| MRAH.S31C | 31 | 62 |
| MRAH.W35C | 35 | 63 |
| MRAH.S35aC | 35a | 64 |
| MRAH.Y50C | 50 | 65 |
| MRAH.I51C | 51 | 66 |
| MRAH.S52C | 52 | 67 |
| MRAH.S62C | 62 | 68 |
| MRAH.L63C | 63 | 69 |
| MRAH.K64C | 64 | 70 |
| MRAH.S65C | 65 | 71 |
| MRAH.D101C | 101 | 72 |
| MRAH.Y102C | 102 | 73 |

TABLE 19
Variants of MRA heavy chain constant region
and position of cysteine substitution

| Variant of MRA | Position of cysteine | |
|---|---|---|
| heavy chain | substitution | SEQ |
| constant region | (EU numbering) | ID NO: |
| G1T4.A118C | 118 | 74 |
| G1T4.S119C | 119 | 75 |
| G1T4.T120C | 120 | 76 |
| G1T4.K121C | 121 | 77 |
| G1T4.G122C | 122 | 78 |
| G1T4.P123C | 123 | 79 |
| G1T4.S124C | 124 | 80 |
| G1T4.V125C | 125 | 81 |
| G1T4.F126C | 126 | 82 |
| G1T4.P127C | 127 | 83 |
| G1T4.S131C | 131 | 84 |
| G1T4.S132C | 132 | 85 |
| G1T4.K133C | 133 | 86 |
| G1T4.S134C | 134 | 87 |
| G1T4.T135C | 135 | 88 |
| G1T4.S136C | 136 | 89 |
| G1T4.G137C | 137 | 90 |
| G1T4.G138C | 138 | 91 |
| G1T4.T139C | 139 | 92 |
| G1T4.A140C | 140 | 93 |
| G1T4.A141C | 141 | 94 |
| G1T4.D148C | 148 | 95 |
| G1T4.Y149C | 149 | 96 |
| G1T4.F150C | 150 | 97 |
| G1T4.P151C | 151 | 98 |
| G1T4.E152C | 152 | 99 |
| G1T4.P153C | 153 | 100 |
| G1T4.V154C | 154 | 101 |
| G1T4.T155C | 155 | 102 |
| G1T4.V156C | 156 | 103 |
| G1T4.S157C | 157 | 104 |
| G1T4.W158C | 158 | 105 |
| G1T4.N159C | 159 | 106 |
| G1T4.S160C | 160 | 107 |
| G1T4.G161C | 161 | 108 |
| G1T4.A162C | 162 | 109 |
| G1T4.L163C | 163 | 110 |
| G1T4.T164C | 164 | 111 |
| G1T4.S165C | 165 | 112 |
| G1T4.G166C | 166 | 113 |
| G1T4.V167C | 167 | 114 |
| G1T4.V173C | 173 | 115 |
| G1T4.L174C | 174 | 116 |
| G1T4.Q175C | 175 | 117 |
| G1T4.S176C | 176 | 118 |
| G1T4.S177C | 177 | 119 |
| G1T4.G178C | 178 | 120 |
| G1T4.L179C | 179 | 121 |
| G1T4.Y180C | 180 | 122 |
| G1T4.V186C | 186 | 123 |
| G1T4.T187C | 187 | 124 |
| G1T4.V188C | 188 | 125 |
| G1T4.P189C | 189 | 126 |
| G1T4.S190C | 190 | 127 |
| G1T4.S191C | 191 | 128 |
| G1T4.S192C | 192 | 129 |
| G1T4.L193C | 193 | 130 |
| G1T4.G194C | 194 | 131 |
| G1T4.T195C | 195 | 132 |
| G1T4.Q196C | 196 | 133 |
| G1T4.T197C | 197 | 134 |
| G1T4.Y198C | 198 | 135 |
| G1T4.I199C | 199 | 136 |
| G1T4.N201C | 201 | 137 |
| G1T4.V202C | 202 | 138 |
| G1T4.N203C | 203 | 139 |
| G1T4.H204C | 204 | 140 |
| G1T4.K205C | 205 | 141 |
| G1T4.P206C | 206 | 142 |
| G1T4.S207C | 207 | 143 |
| G1T4.N208C | 208 | 144 |
| G1T4.T209C | 209 | 145 |
| G1T4.K210C | 210 | 146 |
| G1T4.V211C | 211 | 147 |
| G1T4.D212C | 212 | 148 |
| G1T4.K213C | 213 | 149 |
| G1T4.R214C | 214 | 150 |
| G1T4.V215C | 215 | 151 |
| G1T4.E216C | 216 | 152 |
| G1T4.P217C | 217 | 153 |
| G1T4.K218C | 218 | 154 |
| G1T4.S219C | 219 | 155 |

TABLE 20
MRA variants

| | SEQ ID NO: | | | |
|---|---|---|---|---|
| | Heavy | Heavy | Light | Light |
| | chain | chain | chain | chain |
| Antibody | variable | constant | variable | constant |
| name | region | region | region | region |
| MRAH.Q5C-G1T4 | 21 | 18 | 19 | 20 |
| MRAH.E6C-G1T4 | 22 | 18 | 19 | 20 |
| MRAH.S7C-G1T4 | 23 | 18 | 19 | 20 |
| MRAH.G8C-G1T4 | 24 | 18 | 19 | 20 |
| MRAH.P9C-G1T4 | 25 | 18 | 19 | 20 |
| MRAH.G10C-G1T4 | 26 | 18 | 19 | 20 |
| MRAH.L11C-G1T4 | 27 | 18 | 19 | 20 |
| MRAH.V12C-G1T4 | 28 | 18 | 19 | 20 |
| MRAH.R13C-G1T4 | 29 | 18 | 19 | 20 |
| MRAH.P14C-G1T4 | 30 | 18 | 19 | 20 |
| MRAH.S15C-G1T4 | 31 | 18 | 19 | 20 |
| MRAH.Q16C-G1T4 | 32 | 18 | 19 | 20 |
| MRAH.T17C-G1T4 | 33 | 18 | 19 | 20 |
| MRAH.L18C-G1T4 | 34 | 18 | 19 | 20 |
| MRAH.S19C-G1T4 | 35 | 18 | 19 | 20 |
| MRAH.L20C-G1T4 | 36 | 18 | 19 | 20 |
| MRAH.T21C-G1T4 | 37 | 18 | 19 | 20 |
| MRAH.T23C-G1T4 | 38 | 18 | 19 | 20 |
| MRAH.S25C-G1T4 | 39 | 18 | 19 | 20 |
| MRAH.G26C-G1T4 | 40 | 18 | 19 | 20 |
| MRAH.S28C-G1T4 | 41 | 18 | 19 | 20 |
| MRAH.T30C-G1T4 | 42 | 18 | 19 | 20 |
| MRAH.R66C-G1T4 | 43 | 18 | 19 | 20 |
| MRAH.V67C-G1T4 | 44 | 18 | 19 | 20 |
| MRAH.T68C-G1T4 | 45 | 18 | 19 | 20 |
| MRAH.L70C-G1T4 | 46 | 18 | 19 | 20 |
| MRAH.D72C-G1T4 | 47 | 18 | 19 | 20 |
| MRAH.T73C-G1T4 | 48 | 18 | 19 | 20 |
| MRAH.S74C-G1T4 | 49 | 18 | 19 | 20 |
| MRAH.K75C-G1T4 | 50 | 18 | 19 | 20 |
| MRAH.N76C-G1T4 | 51 | 18 | 19 | 20 |
| MRAH.Q77C-G1T4 | 52 | 18 | 19 | 20 |
| MRAH.S79C-G1T4 | 53 | 18 | 19 | 20 |
| MRAH.L80C-G1T4 | 54 | 18 | 19 | 20 |
| MRAH.R81C-G1T4 | 55 | 18 | 19 | 20 |
| MRAH.L82C-G1T4 | 56 | 18 | 19 | 20 |
| MRAH.S82aC-G1T4 | 57 | 18 | 19 | 20 |
| MRAH.S82bC-G1T4 | 58 | 18 | 19 | 20 |
| MRAH.V82cC-G1T4 | 59 | 18 | 19 | 20 |
| MRAH.S112C-G1T4 | 60 | 18 | 19 | 20 |
| MRAH.S113C-G1T4 | 61 | 18 | 19 | 20 |
| MRAH.S31C-G1T4 | 62 | 18 | 19 | 20 |
| MRAH.W35C-G1T4 | 63 | 18 | 19 | 20 |
| MRAH.S35aC-G1T4 | 64 | 18 | 19 | 20 |
| MRAH.Y50C-G1T4 | 65 | 18 | 19 | 20 |
| MRAH.I51C-G1T4 | 66 | 18 | 19 | 20 |
| MRAH.S52C-G1T4 | 67 | 18 | 19 | 20 |
| MRAH.S62C-G1T4 | 68 | 18 | 19 | 20 |
| MRAH.L63C-G1T4 | 69 | 18 | 19 | 20 |
| MRAH.K64C-G1T4 | 70 | 18 | 19 | 20 |
| MRAH.S65C-G1T4 | 71 | 18 | 19 | 20 |
| MRAH.D101C-G1T4 | 72 | 18 | 19 | 20 |
| MRAH.Y102C-G1T4 | 73 | 18 | 19 | 20 |
| MRAH-G1T4.A118C | 17 | 74 | 19 | 20 |
| MRAH-G1T4.S119C | 17 | 75 | 19 | 20 |
| MRAH-G1T4.T120C | 17 | 76 | 19 | 20 |
| MRAH-G1T4.K121C | 17 | 77 | 19 | 20 |
| MRAH-G1T4.G122C | 17 | 78 | 19 | 20 |
| MRAH-G1T4.P123C | 17 | 79 | 19 | 20 |
| MRAH-G1T4.S124C | 17 | 80 | 19 | 20 |
| MRAH-G1T4.V125C | 17 | 81 | 19 | 20 |
| MRAH-G1T4.F126C | 17 | 82 | 19 | 20 |
| MRAH-G1T4.P127C | 17 | 83 | 19 | 20 |
| MRAH-G1T4.S131C | 17 | 84 | 19 | 20 |
| MRAH-G1T4.S132C | 17 | 85 | 19 | 20 |
| MRAH-G1T4.K133C | 17 | 86 | 19 | 20 |
| MRAH-G1T4.S134C | 17 | 87 | 19 | 20 |
| MRAH-G1T4.T135C | 17 | 88 | 19 | 20 |
| MRAH-G1T4.S136C | 17 | 89 | 19 | 20 |
| MRAH-G1T4.G137C | 17 | 90 | 19 | 20 |
| MRAH-G1T4.G138C | 17 | 91 | 19 | 20 |
| MRAH-G1T4.T139C | 17 | 92 | 19 | 20 |
| MRAH-G1T4.A140C | 17 | 93 | 19 | 20 |
| MRAH-G1T4.A141C | 17 | 94 | 19 | 20 |
| MRAH-G1T4.D148C | 17 | 95 | 19 | 20 |
| MRAH-G1T4.Y149C | 17 | 96 | 19 | 20 |
| MRAH-G1T4.F150C | 17 | 97 | 19 | 20 |
| MRAH-G1T4.P151C | 17 | 98 | 19 | 20 |
| MRAH-G1T4.E152C | 17 | 99 | 19 | 20 |
| MRAH-G1T4.P153C | 17 | 100 | 19 | 20 |
| MRAH-G1T4.V154C | 17 | 101 | 19 | 20 |
| MRAH-G1T4.T155C | 17 | 102 | 19 | 20 |
| MRAH-G1T4.V156C | 17 | 103 | 19 | 20 |
| MRAH-G1T4.S157C | 17 | 104 | 19 | 20 |
| MRAH-G1T4.W158C | 17 | 105 | 19 | 20 |
| MRAH-G1T4.N159C | 17 | 106 | 19 | 20 |
| MRAH-G1T4.S160C | 17 | 107 | 19 | 20 |
| MRAH-G1T4.G161C | 17 | 108 | 19 | 20 |
| MRAH-G1T4.A162C | 17 | 109 | 19 | 20 |
| MRAH-G1T4.L163C | 17 | 110 | 19 | 20 |
| MRAH-G1T4.T164C | 17 | 111 | 19 | 20 |
| MRAH-G1T4.S165C | 17 | 112 | 19 | 20 |
| MRAH-G1T4.G166C | 17 | 113 | 19 | 20 |
| MRAH-G1T4.V167C | 17 | 114 | 19 | 20 |
| MRAH-G1T4.V173C | 17 | 115 | 19 | 20 |
| MRAH-G1T4.L174C | 17 | 116 | 19 | 20 |
| MRAH-G1T4.Q175C | 17 | 117 | 19 | 20 |
| MRAH-G1T4.S176C | 17 | 118 | 19 | 20 |
| MRAH-G1T4.S177C | 17 | 119 | 19 | 20 |
| MRAH-G1T4.G178C | 17 | 120 | 19 | 20 |
| MRAH-G1T4.L179C | 17 | 121 | 19 | 20 |
| MRAH-G1T4.Y180C | 17 | 122 | 19 | 20 |
| MRAH-G1T4.V186C | 17 | 123 | 19 | 20 |
| MRAH-G1T4.T187C | 17 | 124 | 19 | 20 |
| MRAH-G1T4.V188C | 17 | 125 | 19 | 20 |
| MRAH-G1T4.P189C | 17 | 126 | 19 | 20 |
| MRAH-G1T4.S190C | 17 | 127 | 19 | 20 |
| MRAH-G1T4.S191C | 17 | 128 | 19 | 20 |
| MRAH-G1T4.S192C | 17 | 129 | 19 | 20 |
| MRAH-G1T4.L193C | 17 | 130 | 19 | 20 |
| MRAH-G1T4.G194C | 17 | 131 | 19 | 20 |
| MRAH-G1T4.T195C | 17 | 132 | 19 | 20 |
| MRAH-G1T4.Q196C | 17 | 133 | 19 | 20 |
| MRAH-G1T4.T197C | 17 | 134 | 19 | 20 |
| MRAH-G1T4.Y198C | 17 | 135 | 19 | 20 |
| MRAH-G1T4.I199C | 17 | 136 | 19 | 20 |
| MRAH-G1T4.N201C | 17 | 137 | 19 | 20 |
| MRAH-G1T4.V202C | 17 | 138 | 19 | 20 |
| MRAH-G1T4.N203C | 17 | 139 | 19 | 20 |
| MRAH-G1T4.H204C | 17 | 140 | 19 | 20 |
| MRAH-G1T4.K205C | 17 | 141 | 19 | 20 |
| MRAH-G1T4.P206C | 17 | 142 | 19 | 20 |
| MRAH-G1T4.S207C | 17 | 143 | 19 | 20 |
| MRAH-G1T4.N208C | 17 | 144 | 19 | 20 |
| MRAH-G1T4.T209C | 17 | 145 | 19 | 20 |
| MRAH-G1T4.K210C | 17 | 146 | 19 | 20 |
| MRAH-G1T4.V211C | 17 | 147 | 19 | 20 |
| MRAH-G1T4.D212C | 17 | 148 | 19 | 20 |
| MRAH-G1T4.K213C | 17 | 149 | 19 | 20 |
| MRAH-G1T4.R214C | 17 | 150 | 19 | 20 |
| MRAH-G1T4.V215C | 17 | 151 | 19 | 20 |
| MRAH-G1T4.E216C | 17 | 152 | 19 | 20 |
| MRAH-G1T4.P217C | 17 | 153 | 19 | 20 |
| MRAH-G1T4.K218C | 17 | 154 | 19 | 20 |
| MRAH-G1T4.S219C | 17 | 155 | 19 | 20 |

### Reference Example 5-2 Assessment of Protease-Mediated Fab Fragmentation of Antibodies Having Cysteine Substitution at Various Positions in the Heavy Chain

[0990] Using a protease that cleaves the heavy chain hinge region of antibody to cause Fab fragmentation, the MRA variants produced in Reference Example 5-1 were examined for whether they acquired protease resistance so that their fragmentation would be inhibited. The protease used was Lys-C (Endoproteinase Lys-C Sequencing Grade) (SIGMA; 11047825001). Reaction was performed under the conditions of 2 ng/microliter protease, 100 microgram/mL antibody, 80% 25 mM Tris-HCl pH 8.0, 20% PBS, and 35 degrees C. for two hours, or under the conditions of 2 ng/microliter protease, 20 microgram/mL antibody, 80% 25 mM Tris-HCl pH 8.0, 20% PBS, and 35 degrees C. for one hour. The sample was then subjected to non-reducing capillary electrophoresis. Wes (Protein Simple) was used for capillary electrophoresis, and an HRP-labeled anti-kappa chain antibody (abcam; ab46527) was used for detection. The results are shown in FIGS. 26 to 33. Lys-C treatment of MRA caused cleavage of the heavy chain hinge region, resulting in disappearance of the band of IgG at around 150 kDa and appearance of the band of Fab at around 50 kDa. For the MRA variants produced in Reference Example 5-1, some showed the band of Fab dimer appearing at around 96 kDa and some showed the band of undigested IgG detected at around 150 kDa after the protease treatment. The area of each band obtained after the protease treatment was outputted using software dedicated for Wes (Compass for SW; Protein Simple) to calculate the percentage of the band areas of undigested IgG, Fab dimer, etc. The calculated percentage of each band is shown in Table 21.

TABLE 21

| | | | | Heavy | Light |
|---|---|---|---|---|---|
| | | | | chain | chain |
| Antibody | IgG | Fab-Fab | Fab | SEQ | SEQ |
| name | (%) | (%) | (%) | ID NO: | ID NO: |
| MRAH.Q5C-G1T4 | 0.2 | 1.5 | 97.6 | 21 | 16 |
| MRAH.E6C-G1T4 | 0 | 0.3 | 80.7 | 22 | 16 |
| MRAH.S7C-G1T4 | 0.4 | 1.9 | 96.9 | 23 | 16 |
| MRAH.G8C-G1T4 | 16.6 | 1.1 | 76.7 | 24 | 16 |
| MRAH.P9C-G1T4 | 0.2 | 1.5 | 97.2 | 25 | 16 |
| MRAH.G10C-G1T4 | 0.6 | 1.9 | 96.9 | 26 | 16 |
| MRAH.L11C-G1T4 | 0 | 1.2 | 98.3 | 27 | 16 |
| MRAH.V12C-G1T4 | 0.2 | 1 | 97.6 | 28 | 16 |
| MRAH.R13C-G1T4 | 0.6 | 1.9 | 96.6 | 29 | 16 |
| MRAH.P14C-G1T4 | 0.3 | 1.7 | 97.7 | 30 | 16 |
| MRAH.S15C-G1T4 | 0.9 | 1.3 | 81.4 | 31 | 16 |
| MRAH.Q16C-G1T4 | 92.5 | 0 | 2 | 32 | 16 |
| MRAH.T17C-G1T4 | 0.4 | 1.4 | 97.8 | 33 | 16 |
| MRAH.L18C-G1T4 | 0.3 | 0.6 | 96.1 | 34 | 16 |
| MRAH.S19C-G1T4 | 0.3 | 1.2 | 98.1 | 35 | 16 |
| MRAH.L20C-G1T4 | 1 | 0.3 | 93.3 | 36 | 16 |
| MRAH.T21C-G1T4 | 0.5 | 1 | 98.3 | 37 | 16 |
| MRAH.T23C-G1T4 | no data | no data | no data | 38 | 16 |
| MRAH.S25C-G1T4 | 0.3 | 2.8 | 87 | 39 | 16 |
| MRAH.G26C-G1T4 | 0.4 | 1.7 | 85.5 | 40 | 16 |
| MRAH.S28C-G1T4 | 98.6 | 0 | 0.2 | 41 | 16 |
| MRAH.T30C-G1T4 | 0.5 | 0.7 | 97.8 | 42 | 16 |
| MRAH.R66C-G1T4 | 0.2 | 1.2 | 97.9 | 43 | 16 |
| MRAH.V67C-G1T4 | 0.3 | 0.4 | 97.8 | 44 | 16 |
| MRAH.T68C-G1T4 | 0.2 | 1.4 | 97.7 | 45 | 16 |
| MRAH.L70C-G1T4 | 0.2 | 0.9 | 98 | 46 | 16 |
| MRAH.D72C-G1T4 | 0.3 | 0.8 | 97.6 | 47 | 16 |
| MRAH.T73C-G1T4 | 0.5 | 0.9 | 97.7 | 48 | 16 |
| MRAH.S74C-G1T4 | 97.1 | 0 | 0.3 | 49 | 16 |
| MRAH.K75C-G1T4 | 0.1 | 1.5 | 97 | 50 | 16 |
| MRAH.N76C-G1T4 | 0.4 | 0.4 | 93.1 | 51 | 16 |
| MRAH.Q77C-G1T4 | 0.1 | 0.2 | 99.6 | 52 | 16 |
| MRAH.S79C-G1T4 | 0.1 | 1.6 | 96.7 | 53 | 16 |
| MRAH.L80C-G1T4 | 0.2 | 0 | 96.5 | 54 | 16 |
| MRAH.R81C-G1T4 | 0 | 1.4 | 98 | 55 | 16 |
| MRAH.L82C-G1T4 | 0 | 0 | 96.8 | 56 | 16 |
| MRAH.S82aC-G1T4 | 0.6 | 1 | 96.7 | 57 | 16 |
| MRAH.S82bC-G1T4 | 97.5 | 0 | 0.3 | 58 | 16 |
| MRAH.V82cC-G1T4 | 0.1 | 0.3 | 95.6 | 59 | 16 |
| MRAH.S112C-G1T4 | 0.1 | 1.1 | 97.6 | 60 | 16 |
| MRAH.S113C-G1T4 | 0.1 | 2.8 | 95.9 | 61 | 16 |
| MRAH.S31C-G1T4 | 0.5 | 2 | 75.7 | 62 | 16 |
| MRAH.W35C-G1T4 | 0.1 | 0.3 | 91.1 | 63 | 16 |
| MRAH.S35aC-G1T4 | 0 | 0.6 | 90.7 | 64 | 16 |
| MRAH.Y50C-G1T4 | 0.2 | 1.5 | 95.8 | 65 | 16 |
| MRAH.I51C-G1T4 | 0.2 | 0.8 | 94.4 | 66 | 16 |
| MRAH.S52C-G1T4 | 0.3 | 1.7 | 96.4 | 67 | 16 |
| MRAH.S62C-G1T4 | 0.2 | 1.1 | 97.6 | 68 | 16 |
| MRAH.L63C-G1T4 | 0.4 | 1.4 | 94.2 | 69 | 16 |
| MRAH.K64C-G1T4 | 0 | 1.6 | 91.7 | 70 | 16 |
| MRAH.S65C-G1T4 | 0.3 | 1.7 | 95.6 | 71 | 16 |
| MRAH.D101C-G1T4 | 0 | 1.2 | 97 | 72 | 16 |
| MRAH.Y102C-G1T4 | 0.2 | 1.3 | 96.8 | 73 | 16 |
| MRAH-G1T4.A118C | 1.2 | 1 | 89 | 74 | 16 |
| MRAH-G1T4.S119C | 2.3 | 14 | 77.7 | 75 | 16 |
| MRAH-G1T4.T120C | 0 | 0.1 | 0.1 | 76 | 16 |
| MRAH-G1T4.K121C | 2.4 | 1.1 | 82.2 | 77 | 16 |
| MRAH-G1T4.G122C | 8 | 1.4 | 79.8 | 78 | 16 |
| MRAH-G1T4.P123C | 7.1 | 0 | 45.7 | 79 | 16 |
| MRAH-G1T4.S124C | 0.8 | 1.7 | 94.5 | 80 | 16 |
| MRAH-G1T4.V125C | 2.3 | 0 | 62 | 81 | 16 |
| MRAH-G1T4.F126C | 2.1 | 1 | 85.5 | 82 | 16 |
| MRAH-G1T4.P127C | 2.9 | 1.4 | 77.4 | 83 | 16 |
| MRAH-G1T4.S131C | 68.4 | 0 | 0 | 84 | 16 |
| MRAH-G1T4.S132C | 13.9 | 0.8 | 54.6 | 85 | 16 |
| MRAH-G1T4.K133C | 66.8 | 0 | 0 | 86 | 16 |
| MRAH-G1T4.S134C | 63.5 | 0 | 21.9 | 87 | 16 |
| MRAH-G1T4.T135C | 44.7 | 13.2 | 23.6 | 88 | 16 |
| MRAH-G1T4.S136C | 22.9 | 27.3 | 35.1 | 89 | 16 |
| MRAH-G1T4.G137C | 8.4 | 18.1 | 62.1 | 90 | 16 |
| MRAH-G1T4.G138C | no data | no data | no data | 91 | 16 |
| MRAH-G1T4.T139C | 7.4 | 1.4 | 82.1 | 92 | 16 |
| MRAH-G1T4.A140C | 20.2 | 0 | 47.2 | 93 | 16 |
| MRAH-G1T4.A141C | 0.3 | 0 | 31.9 | 94 | 16 |
| MRAH-G1T4.D148C | 21 | 0 | 64.8 | 95 | 16 |
| MRAH-G1T4.Y149C | 0.5 | 0 | 58.1 | 96 | 16 |
| MRAH-G1T4.F150C | 79.2 | 0 | 0.4 | 97 | 16 |
| MRAH-G1T4.P151C | 2 | 0 | 56.1 | 98 | 16 |
| MRAH-G1T4.E152C | 0.9 | 0.3 | 84.8 | 99 | 16 |
| MRAH-G1T4.P153C | 4.4 | 0.8 | 86.6 | 100 | 16 |
| MRAH-G1T4.V154C | 4 | 0 | 45.7 | 101 | 16 |
| MRAH-G1T4.T155C | 20.2 | 1.4 | 67.6 | 102 | 16 |
| MRAH-G1T4.V156C | 7 | 0 | 39.2 | 103 | 16 |
| MRAH-G1T4.S157C | 13.5 | 3.2 | 75.9 | 104 | 16 |
| MRAH-G1T4.W158C | 4.2 | 0 | 66.1 | 105 | 16 |
| MRAH-G1T4.N159C | 13.9 | 1.9 | 76.1 | 106 | 16 |
| MRAH-G1T4.S160C | 7.7 | 20.9 | 66.2 | 107 | 16 |
| MRAH-G1T4.G161C | 14.1 | 12 | 68.6 | 108 | 16 |
| MRAH-G1T4.A162C | 9.6 | 17.9 | 65.8 | 109 | 16 |
| MRAH-G1T4.L163C | 10.2 | 6.1 | 75.9 | 110 | 16 |
| MRAH-G1T4.T164C | 3.8 | 3.2 | 88.7 | 111 | 16 |
| MRAH-G1T4.S165C | 7.8 | 4.1 | 81.5 | 112 | 16 |
| MRAH-G1T4.G166C | 4.5 | 2.2 | 89.4 | 113 | 16 |
| MRAH-G1T4.V167C | 5.5 | 2.5 | 81.2 | 114 | 16 |
| MRAH-G1T4.V173C | 2.1 | 1.6 | 92.2 | 115 | 16 |
| MRAH-G1T4.L174C | 19.8 | 0 | 67.1 | 116 | 16 |
| MRAH-G1T4.Q175C | 4.4 | 1.1 | 86.6 | 117 | 16 |
| MRAH-G1T4.S176C | 2.3 | 7.7 | 85.5 | 118 | 16 |
| MRAH-G1T4.S177C | 7.1 | 12.4 | 71.6 | 119 | 16 |
| MRAH-G1T4.G178C | 6.2 | 2.4 | 85.5 | 120 | 16 |
| MRAH-G1T4.L179C | 0.2 | 0 | 0 | 121 | 16 |
| MRAH-G1T4.Y180C | 0 | 0 | 72.7 | 122 | 16 |
| MRAH-G1T4.V186C | 0 | 0 | 73.3 | 123 | 16 |
| MRAH-G1T4.T187C | 0.8 | 2.5 | 90.3 | 124 | 16 |
| MRAH-G1T4.V188C | 0.3 | 4 | 82.7 | 125 | 16 |
| MRAH-G1T4.P189C | 0.9 | 4.7 | 89.6 | 126 | 16 |
| MRAH-G1T4.S190C | 10.9 | 0 | 74.4 | 127 | 16 |
| MRAH-G1T4.S191C | 2.3 | 46.4 | 45.1 | 128 | 16 |
| MRAH-G1T4.S192C | 1.3 | 11 | 83 | 129 | 16 |
| MRAH-G1T4.L193C | 3.6 | 0 | 70.5 | 130 | 16 |
| MRAH-G1T4.G194C | 13.8 | 0 | 0 | 131 | 16 |
| MRAH-G1T4.T195C | 29.6 | 0 | 57.3 | 132 | 16 |
| MRAH-G1T4.Q196C | 1.5 | 0 | 92.6 | 133 | 16 |
| MRAH-G1T4.T197C | 81.5 | 0 | 4.5 | 134 | 16 |
| MRAH-G1T4.Y198C | 0.1 | 0.3 | 17.1 | 135 | 16 |
| MRAH-G1T4.I199C | 1 | 1.7 | 91.6 | 136 | 16 |
| MRAH-G1T4.N201C | 0.7 | 4 | 90.3 | 137 | 16 |
| MRAH-G1T4.V202C | 0 | 0.1 | 6.6 | 138 | 16 |
| MRAH-G1T4.N203C | 0.6 | 2.4 | 89.8 | 139 | 16 |
| MRAH-G1T4.H204C | 0.4 | 2.2 | 77.7 | 140 | 16 |
| MRAH-G1T4.K205C | 0.2 | 2.3 | 85.5 | 141 | 16 |
| MRAH-G1T4.P206C | 0.4 | 2.1 | 86.9 | 142 | 16 |
| MRAH-G1T4.S207C | no data | no data | no data | 143 | 16 |
| MRAH-G1T4.N208C | 0.4 | 0 | 86.2 | 144 | 16 |
| MRAH-G1T4.T209C | 0.7 | 0 | 83.1 | 145 | 16 |
| MRAH-G1T4.K210C | 0.6 | 0 | 81.7 | 146 | 16 |
| MRAH-G1T4.V211C | 0.3 | 1 | 67.6 | 147 | 16 |
| MRAH-G1T4.D212C | 1.1 | 1.8 | 80.9 | 148 | 16 |
| MRAH-G1T4.K213C | 6.5 | 0 | 41.9 | 149 | 16 |
| MRAH-G1T4.R214C | 18.6 | 0 | 42.7 | 150 | 16 |
| MRAH-G1T4.V215C | 0 | 0 | 11.8 | 151 | 16 |
| MRAH-G1T4.E216C | 7.4 | 0 | 64.8 | 152 | 16 |
| MRAH-G1T4.P217C | 4.5 | 0.2 | 43.3 | 153 | 16 |
| MRAH-G1T4.K218C | 30.8 | 0 | 29.5 | 154 | 16 |
| MRAH-G1T4.S219C | 46.9 | 0.1 | 18 | 155 | 16 |

[0991] From this result, it was found that cysteine substitution in the heavy chain variable region or heavy chain constant region improved the protease resistance of the heavy chain hinge region in the MRA variants shown in Table 22. Alternatively, the result suggested that a Fab dimer was formed by a covalent bond between the Fab-Fab.

TABLE 22
MRA variants

| | SEQ ID NO: | | | |
|---|---|---|---|---|
| | Heavy | Heavy | Light | Light |
| | chain | chain | chain | chain |
| Antibody | variable | constant | variable | constant |
| name | region | region | region | region |
| MRAH.G8C-G1T4 | 24 | 18 | 19 | 20 |
| MRAH.Q16C-G1T4 | 32 | 18 | 19 | 20 |
| MRAH.S28C-G1T4 | 41 | 18 | 19 | 20 |
| MRAH.S74C-G1T4 | 49 | 18 | 19 | 20 |
| MRAH.S82bC-G1T4 | 58 | 18 | 19 | 20 |
| MRAH-G1T4.S119C | 17 | 75 | 19 | 20 |
| MRAH-G1T4.G122C | 17 | 78 | 19 | 20 |
| MRAH-G1T4.P123C | 17 | 79 | 19 | 20 |
| MRAH-G1T4.S131C | 17 | 84 | 19 | 20 |
| MRAH-G1T4.S132C | 17 | 85 | 19 | 20 |
| MRAH-G1T4.K133C | 17 | 86 | 19 | 20 |
| MRAH-G1T4.S134C | 17 | 87 | 19 | 20 |
| MRAH-G1T4.T135C | 17 | 88 | 19 | 20 |
| MRAH-G1T4.S136C | 17 | 89 | 19 | 20 |
| MRAH-G1T4.G137C | 17 | 90 | 19 | 20 |
| MRAH-G1T4.T139C | 17 | 92 | 19 | 20 |
| MRAH-G1T4.A140C | 17 | 93 | 19 | 20 |
| MRAH-G1T4.D148C | 17 | 95 | 19 | 20 |
| MRAH-G1T4.F150C | 17 | 97 | 19 | 20 |
| MRAH-G1T4.T155C | 17 | 102 | 19 | 20 |
| MRAH-G1T4.V156C | 17 | 103 | 19 | 20 |
| MRAH-G1T4.S157C | 17 | 104 | 19 | 20 |
| MRAH-G1T4.N159C | 17 | 106 | 19 | 20 |
| MRAH-G1T4.S160C | 17 | 107 | 19 | 20 |
| MRAH-G1T4.G161C | 17 | 108 | 19 | 20 |
| MRAH-G1T4.A162C | 17 | 109 | 19 | 20 |
| MRAH-G1T4.L163C | 17 | 110 | 19 | 20 |
| MRAH-G1T4.S165C | 17 | 112 | 19 | 20 |
| MRAH-G1T4.V167C | 17 | 114 | 19 | 20 |
| MRAH-G1T4.L174C | 17 | 116 | 19 | 20 |
| MRAH-G1T4.S176C | 17 | 118 | 19 | 20 |
| MRAH-G1T4.S177C | 17 | 119 | 19 | 20 |
| MRAH-G1T4.G178C | 17 | 120 | 19 | 20 |
| MRAH-G1T4.S190C | 17 | 127 | 19 | 20 |
| MRAH-G1T4.S191C | 17 | 128 | 19 | 20 |
| MRAH-G1T4.S192C | 17 | 129 | 19 | 20 |
| MRAH-G1T4.G194C | 17 | 131 | 19 | 20 |
| MRAH-G1T4.T195C | 17 | 132 | 19 | 20 |
| MRAH-G1T4.T197C | 17 | 134 | 19 | 20 |
| MRAH-G1T4.K213C | 17 | 149 | 19 | 20 |
| MRAH-G1T4.R214C | 17 | 150 | 19 | 20 |
| MRAH-G1T4.E216C | 17 | 152 | 19 | 20 |
| MRAH-G1T4.K218C | 17 | 154 | 19 | 20 |
| MRAH-G1T4.S219C | 17 | 155 | 19 | 20 |

### Reference Example 6 Assessment of Antibodies Having Cysteine Substitution at Various Positions in the Light Chain

### Reference Example 6-1 Assessment of Antibodies Having Cysteine Substitution at Various Positions in the Light Chain

[0992] The light chain variable region and constant region of an anti-human IL6R neutralizing antibody, MRA (heavy chain: MRAH-G1T4 (SEQ ID NO: 15), light chain: MRAL-k0 (SEQ ID NO: 16)) were subjected to a study in which an arbitrary amino acid residue structurally exposed to the surface was substituted with cysteine. Amino acid residues within the light chain variable region of MRA (MRAL, SEQ ID NO: 19) were substituted with cysteine to produce variants of the light chain variable region of MRA shown in Table 23. These variants of the light chain variable region of MRA were each linked with the light chain constant region of MRA (k0, SEQ ID NO: 20) to produce variants of the light chain of MRA, and expression vectors encoding the corresponding genes were produced by a method known to the person skilled in the art.

[0993] In addition, amino acid residues within the light chain constant region of MRA (k0, SEQ ID NO: 20) were substituted with cysteine to produce variants of the light chain constant region of MRA shown in Table 24. These variants of the light chain constant region of MRA were each linked with the light chain variable region of MRA (MRAL, SEQ ID NO: 19) to produce variants of the light chain of MRA, and expression vectors encoding the corresponding genes were produced by a method known to the person skilled in the art.

[0994] The MRA light chain variants produced above were combined with the MRA heavy chain. The resultant MRA variants shown in Table 25 were expressed by transient expression using FreeStyle293 cells (Invitrogen) or Expi293 cells (Life technologies) by a method known to the person skilled in the art, and purified with Protein A by a method known to the person skilled in the art.

TABLE 23
Variants of MRA light chain variable region
and position of cysteine substitution

| Variant of MRA | Position of cysteine | |
|---|---|---|
| light chain | substitution | SEQ |
| variable region | (Kabat numbering) | ID NO: |
| MRAL.T5C | 5 | 156 |
| MRAL.Q6C | 6 | 157 |
| MRAL.S7C | 7 | 158 |
| MRAL.P8C | 8 | 159 |
| MRAL.S9C | 9 | 160 |
| MRAL.S10C | 10 | 161 |
| MRAL.L11C | 11 | 162 |
| MRAL.S12C | 12 | 163 |
| MRAL.A13C | 13 | 164 |
| MRAL.S14C | 14 | 165 |
| MRAL.V15C | 15 | 166 |
| MRAL.G16C | 16 | 167 |
| MRAL.D17C | 17 | 168 |
| MRAL.R18C | 18 | 169 |
| MRAL.V19C | 19 | 170 |
| MRAL.T20C | 20 | 171 |
| MRAL.I21C | 21 | 172 |
| MRAL.T22C | 22 | 173 |
| MRAL.G57C | 57 | 174 |
| MRAL.V58C | 58 | 175 |
| MRAL.P59C | 59 | 176 |
| MRAL.S60C | 60 | 177 |
| MRAL.R61C | 61 | 178 |
| MRAL.F62C | 62 | 179 |
| MRAL.S63C | 63 | 180 |
| MRAL.S65C | 65 | 181 |
| MRAL.S67C | 67 | 182 |
| MRAL.G68C | 68 | 183 |
| MRAL.T69C | 69 | 184 |
| MRAL.D70C | 70 | 185 |
| MRAL.T72C | 72 | 186 |
| MRAL.F73C | 73 | 187 |
| MRAL.T74C | 74 | 188 |
| MRAL.I75C | 75 | 189 |
| MRAL.S76C | 76 | 190 |
| MRAL.S77C | 77 | 191 |
| MRAL.L78C | 78 | 192 |
| MRAL.Q79C | 79 | 193 |
| MRAL.F98C | 98 | 194 |
| MRAL.G99C | 99 | 195 |
| MRAL.Q100C | 100 | 196 |
| MRAL.G101C | 101 | 197 |
| MRAL.T102C | 102 | 198 |
| MRAL.K103C | 103 | 199 |
| MRAL.V104C | 104 | 200 |
| MRAL.E105C | 105 | 201 |
| MRAL.I106C | 106 | 202 |
| MRAL.K107C | 107 | 203 |
| MRAL.A25C | 25 | 204 |
| MRAL.S26C | 26 | 205 |
| MRAL.Q27C | 27 | 206 |
| MRAL.Y32C | 32 | 207 |
| MRAL.L33C | 33 | 208 |
| MRAL.N34C | 34 | 209 |
| MRAL.Y50C | 50 | 210 |
| MRAL.T51C | 51 | 211 |
| MRAL.H55C | 55 | 212 |
| MRAL.S56C | 56 | 213 |
| MRAL.Y96C | 96 | 214 |
| MRAL.T97C | 97 | 215 |

TABLE 24
Variants of MRA light chain constant region
and position of cysteine substitution

| Variant of MRA | Position of cysteine | |
|---|---|---|
| light chain constant | substitution | SEQ ID |
| region | (EU numbering) | NO: |
| k0.R108C | 108 | 216 |
| k0.T109C | 109 | 217 |
| k0.V110C | 110 | 218 |
| k0.A111C | 111 | 219 |
| k0.A112C | 112 | 220 |
| k0.P113C | 113 | 221 |
| k0.S114C | 114 | 222 |
| k0.V115C | 115 | 223 |
| k0.F116C | 116 | 224 |
| k0.P120C | 120 | 225 |
| k0.S121C | 121 | 226 |
| k0.D122C | 122 | 227 |
| k0.E123C | 123 | 228 |
| k0.Q124C | 124 | 229 |
| k0.L125C | 125 | 230 |
| k0.K126C | 126 | 231 |
| k0.S127C | 127 | 232 |
| k0.G128C | 128 | 233 |
| k0.T129C | 129 | 234 |
| k0.A130C | 130 | 235 |
| k0.S131C | 131 | 236 |
| k0.L136C | 136 | 237 |
| k0.N137C | 137 | 238 |
| k0.N138C | 138 | 239 |
| k0.F139C | 139 | 240 |
| k0.Y140C | 140 | 241 |
| k0.P141C | 141 | 242 |
| k0.R142C | 142 | 243 |
| k0.E143C | 143 | 244 |
| k0.A144C | 144 | 245 |
| k0.K145C | 145 | 246 |
| k0.V146C | 146 | 247 |
| k0.Q147C | 147 | 248 |
| k0.W148C | 148 | 249 |
| k0.K149C | 149 | 250 |
| k0.V150C | 150 | 251 |
| k0.D151C | 151 | 252 |
| k0.N152C | 152 | 253 |
| k0.A153C | 153 | 254 |
| k0.L154C | 154 | 255 |
| k0.Q155C | 155 | 256 |
| k0.S156C | 156 | 257 |
| k0.G157C | 157 | 258 |
| k0.N158C | 158 | 259 |
| k0.S159C | 159 | 260 |
| k0.Q160C | 160 | 261 |
| k0.E161C | 161 | 262 |
| k0.S162C | 162 | 263 |
| k0.V163C | 163 | 264 |
| k0.T164C | 164 | 265 |
| k0.E165C | 165 | 266 |
| k0.Q166C | 166 | 267 |
| k0.D167C | 167 | 268 |
| k0.S168C | 168 | 269 |
| k0.K169C | 169 | 270 |
| k0.D170C | 170 | 271 |
| k0.S171C | 171 | 272 |
| k0.T172C | 172 | 273 |
| k0.Y173C | 173 | 274 |
| k0.S174C | 174 | 275 |
| k0.L175C | 175 | 276 |
| k0.T180C | 180 | 277 |
| k0.L181C | 181 | 278 |
| k0.S182C | 182 | 279 |
| k0.K183C | 183 | 280 |
| k0.A184C | 184 | 281 |
| k0.D185C | 185 | 282 |
| k0.Y186C | 186 | 283 |
| k0.E187C | 187 | 284 |
| k0.K188C | 188 | 285 |
| k0.H189C | 189 | 286 |
| k0.K190C | 190 | 287 |
| k0.V191C | 191 | 288 |
| k0.Y192C | 192 | 289 |
| k0.A193C | 193 | 290 |
| k0.E195C | 195 | 291 |
| k0.V196C | 196 | 292 |
| k0.T197C | 197 | 293 |
| k0.H198C | 198 | 294 |
| k0.Q199C | 199 | 295 |
| k0.G200C | 200 | 296 |
| k0.L201C | 201 | 297 |
| k0.S202C | 202 | 298 |
| k0.S203C | 203 | 299 |
| k0.P204C | 204 | 300 |
| k0.V205C | 205 | 301 |
| k0.T206C | 206 | 302 |
| k0.K207C | 207 | 303 |
| k0.S208C | 208 | 304 |
| k0.F209C | 209 | 305 |
| k0.N210C | 210 | 306 |
| k0.R211C | 211 | 307 |
| k0.G212C | 212 | 308 |
| k0.E213C | 213 | 309 |

TABLE 25
MRA variants

SEQ ID NO:

| | Heavy | Heavy | Light | Light |
|---|---|---|---|---|
| | chain | chain | chain | chain |
| | variable | constant | variable | constant |
| Antibody name | region | region | region | region |
| MRAL.T5C-k0 | 17 | 18 | 156 | 20 |
| MRAL.Q6C-k0 | 17 | 18 | 157 | 20 |
| MRAL.S7C-k0 | 17 | 18 | 158 | 20 |
| MRAL.P8C-k0 | 17 | 18 | 159 | 20 |
| MRAL.S9C-k0 | 17 | 18 | 160 | 20 |
| MRAL.S10C-k0 | 17 | 18 | 161 | 20 |
| MRAL.L11C-k0 | 17 | 18 | 162 | 20 |
| MRAL.S12C-k0 | 17 | 18 | 163 | 20 |
| MRAL.A13C-k0 | 17 | 18 | 164 | 20 |
| MRAL.S14C-k0 | 17 | 18 | 165 | 20 |
| MRAL.V15C-k0 | 17 | 18 | 166 | 20 |
| MRAL.G16C-k0 | 17 | 18 | 167 | 20 |
| MRAL.D17C-k0 | 17 | 18 | 168 | 20 |
| MRAL.R18C-k0 | 17 | 18 | 169 | 20 |
| MRAL.V19C-k0 | 17 | 18 | 170 | 20 |
| MRAL.T20C-k0 | 17 | 18 | 171 | 20 |
| MRAL.I21C-k0 | 17 | 18 | 172 | 20 |
| MRAL.T22C-k0 | 17 | 18 | 173 | 20 |
| MRAL.G57C-k0 | 17 | 18 | 174 | 20 |
| MRAL.V58C-k0 | 17 | 18 | 175 | 20 |
| MRAL.P59C-k0 | 17 | 18 | 176 | 20 |
| MRAL.S60C-k0 | 17 | 18 | 177 | 20 |
| MRAL.R61C-k0 | 17 | 18 | 178 | 20 |
| MRAL.F62C-k0 | 17 | 18 | 179 | 20 |
| MRAL.S63C-k0 | 17 | 18 | 180 | 20 |
| MRAL.S65C-k0 | 17 | 18 | 181 | 20 |
| MRAL.S67C-k0 | 17 | 18 | 182 | 20 |
| MRAL.G68C-k0 | 17 | 18 | 183 | 20 |
| MRAL.T69C-k0 | 17 | 18 | 184 | 20 |
| MRAL.D70C-k0 | 17 | 18 | 185 | 20 |
| MRAL.T72C-k0 | 17 | 18 | 186 | 20 |
| MRAL.F73C-k0 | 17 | 18 | 187 | 20 |
| MRAL.T74C-k0 | 17 | 18 | 188 | 20 |
| MRAL.I75C-k0 | 17 | 18 | 189 | 20 |
| MRAL.S76C-k0 | 17 | 18 | 190 | 20 |
| MRAL.S77C-k0 | 17 | 18 | 191 | 20 |
| MRAL.L78C-k0 | 17 | 18 | 192 | 20 |
| MRAL.Q79C-k0 | 17 | 18 | 193 | 20 |
| MRAL.F98C-k0 | 17 | 18 | 194 | 20 |
| MRAL.G99C-k0 | 17 | 18 | 195 | 20 |
| MRAL.Q100C-k0 | 17 | 18 | 196 | 20 |
| MRAL.G101C-k0 | 17 | 18 | 197 | 20 |
| MRAL.T102C-k0 | 17 | 18 | 198 | 20 |
| MRAL.K103C-k0 | 17 | 18 | 199 | 20 |
| MRAL.V104C-k0 | 17 | 18 | 200 | 20 |
| MRAL.E105C-k0 | 17 | 18 | 201 | 20 |
| MRAL.I106C-k0 | 17 | 18 | 202 | 20 |
| MRAL.K107C-k0 | 17 | 18 | 203 | 20 |
| MRAL.A25C-k0 | 17 | 18 | 204 | 20 |
| MRAL.S26C-k0 | 17 | 18 | 205 | 20 |
| MRAL.Q27C-k0 | 17 | 18 | 206 | 20 |
| MRAL.Y32C-k0 | 17 | 18 | 207 | 20 |
| MRAL.L33C-k0 | 17 | 18 | 208 | 20 |
| MRAL.N34C-k0 | 17 | 18 | 209 | 20 |
| MRAL.Y50C-k0 | 17 | 18 | 210 | 20 |
| MRAL.T51C-k0 | 17 | 18 | 211 | 20 |
| MRAL.H55C-k0 | 17 | 18 | 212 | 20 |
| MRAL.S56C-k0 | 17 | 18 | 213 | 20 |
| MRAL.Y96C-k0 | 17 | 18 | 214 | 20 |
| MRAL.T97C-k0 | 17 | 18 | 215 | 20 |
| MRAL-k0.R108C | 17 | 18 | 19 | 216 |
| MRAL-k0.T109C | 17 | 18 | 19 | 217 |
| MRAL-k0.V110C | 17 | 18 | 19 | 218 |
| MRAL-k0.A111C | 17 | 18 | 19 | 219 |
| MRAL-k0.A112C | 17 | 18 | 19 | 220 |
| MRAL-k0.P113C | 17 | 18 | 19 | 221 |
| MRAL-k0.S114C | 17 | 18 | 19 | 222 |
| MRAL-k0.V115C | 17 | 18 | 19 | 223 |
| MRAL-k0.F116C | 17 | 18 | 19 | 224 |
| MRAL-k0.P120C | 17 | 18 | 19 | 225 |
| MRAL-k0.S121C | 17 | 18 | 19 | 226 |
| MRAL-k0.D122C | 17 | 18 | 19 | 227 |
| MRAL-k0.E123C | 17 | 18 | 19 | 228 |
| MRAL-k0.Q124C | 17 | 18 | 19 | 229 |
| MRAL-k0.L125C | 17 | 18 | 19 | 230 |
| MRAL-k0.K126C | 17 | 18 | 19 | 231 |
| MRAL-k0.S127C | 17 | 18 | 19 | 232 |
| MRAL-k0.G128C | 17 | 18 | 19 | 233 |
| MRAL-k0.T129C | 17 | 18 | 19 | 234 |
| MRAL-k0.A130C | 17 | 18 | 19 | 235 |
| MRAL-k0.S131C | 17 | 18 | 19 | 236 |
| MRAL-k0.L136C | 17 | 18 | 19 | 237 |
| MRAL-k0.N137C | 17 | 18 | 19 | 238 |
| MRAL-k0.N138C | 17 | 18 | 19 | 239 |
| MRAL-k0.F139C | 17 | 18 | 19 | 240 |
| MRAL-k0.Y140C | 17 | 18 | 19 | 241 |
| MRAL-k0.P141C | 17 | 18 | 19 | 242 |
| MRAL-k0.R142C | 17 | 18 | 19 | 243 |
| MRAL-k0.E143C | 17 | 18 | 19 | 244 |
| MRAL-k0.A144C | 17 | 18 | 19 | 245 |
| MRAL-k0.K145C | 17 | 18 | 19 | 246 |
| MRAL-k0.V146C | 17 | 18 | 19 | 247 |
| MRAL-k0.Q147C | 17 | 18 | 19 | 248 |
| MRAL-k0.W148C | 17 | 18 | 19 | 249 |
| MRAL-k0.K149C | 17 | 18 | 19 | 250 |
| MRAL-k0.V150C | 17 | 18 | 19 | 251 |
| MRAL-k0.D151C | 17 | 18 | 19 | 252 |
| MRAL-k0.N152C | 17 | 18 | 19 | 253 |
| MRAL-k0.A153C | 17 | 18 | 19 | 254 |
| MRAL-k0.L154C | 17 | 18 | 19 | 255 |
| MRAL-k0.Q155C | 17 | 18 | 19 | 256 |
| MRAL-k0.S156C | 17 | 18 | 19 | 257 |
| MRAL-k0.G157C | 17 | 18 | 19 | 258 |
| MRAL-k0.N158C | 17 | 18 | 19 | 259 |
| MRAL-k0.S159C | 17 | 18 | 19 | 260 |
| MRAL-k0.Q160C | 17 | 18 | 19 | 261 |
| MRAL-k0.E161C | 17 | 18 | 19 | 262 |
| MRAL-k0.S162C | 17 | 18 | 19 | 263 |
| MRAL-k0.V163C | 17 | 18 | 19 | 264 |
| MRAL-k0.T164C | 17 | 18 | 19 | 265 |
| MRAL-k0.E165C | 17 | 18 | 19 | 266 |
| MRAL-k0.Q166C | 17 | 18 | 19 | 267 |
| MRAL-k0.D167C | 17 | 18 | 19 | 268 |
| MRAL-k0.S168C | 17 | 18 | 19 | 269 |
| MRAL-k0.K169C | 17 | 18 | 19 | 270 |
| MRAL-k0.D170C | 17 | 18 | 19 | 271 |
| MRAL-k0.S171C | 17 | 18 | 19 | 272 |
| MRAL-k0.T172C | 17 | 18 | 19 | 273 |
| MRAL-k0.Y173C | 17 | 18 | 19 | 274 |
| MRAL-k0.S174C | 17 | 18 | 19 | 275 |
| MRAL-k0.L175C | 17 | 18 | 19 | 276 |
| MRAL-k0.T180C | 17 | 18 | 19 | 277 |
| MRAL-k0.L181C | 17 | 18 | 19 | 278 |
| MRAL-k0.S182C | 17 | 18 | 19 | 279 |
| MRAL-k0.K183C | 17 | 18 | 19 | 280 |
| MRAL-k0.A184C | 17 | 18 | 19 | 281 |
| MRAL-k0.D185C | 17 | 18 | 19 | 282 |
| MRAL-k0.Y186C | 17 | 18 | 19 | 283 |
| MRAL-k0.E187C | 17 | 18 | 19 | 284 |
| MRAL-k0.K188C | 17 | 18 | 19 | 285 |
| MRAL-k0.H189C | 17 | 18 | 19 | 286 |
| MRAL-k0.K190C | 17 | 18 | 19 | 287 |
| MRAL-k0.V191C | 17 | 18 | 19 | 288 |
| MRAL-k0.Y192C | 17 | 18 | 19 | 289 |
| MRAL-k0.A193C | 17 | 18 | 19 | 290 |
| MRAL-k0.E195C | 17 | 18 | 19 | 291 |
| MRAL-k0.V196C | 17 | 18 | 19 | 292 |
| MRAL-k0.T197C | 17 | 18 | 19 | 293 |
| MRAL-k0.H198C | 17 | 18 | 19 | 294 |
| MRAL-k0.Q199C | 17 | 18 | 19 | 295 |
| MRAL-k0.G200C | 17 | 18 | 19 | 296 |
| MRAL-k0.L201C | 17 | 18 | 19 | 297 |
| MRAL-k0.S202C | 17 | 18 | 19 | 298 |
| MRAL-k0.S203C | 17 | 18 | 19 | 299 |
| MRAL-k0.P204C | 17 | 18 | 19 | 300 |
| MRAL-k0.V205C | 17 | 18 | 19 | 301 |
| MRAL-k0.T206C | 17 | 18 | 19 | 302 |
| MRAL-k0.K207C | 17 | 18 | 19 | 303 |
| MRAL-k0.S208C | 17 | 18 | 19 | 304 |
| MRAL-k0.F209C | 17 | 18 | 19 | 305 |
| MRAL-k0.N210C | 17 | 18 | 19 | 306 |
| MRAL-k0.R211C | 17 | 18 | 19 | 307 |
| MRAL-k0.G212C | 17 | 18 | 19 | 308 |
| MRAL-k0.E213C | 17 | 18 | 19 | 309 |

### Reference Example 6-2 Assessment of Protease-Mediated Fab Fragmentation of Antibodies Having Cysteine Substitution at Various Positions in the Light Chain

[0995] Using a protease that cleaves the heavy chain hinge region of antibody to cause Fab fragmentation, the MRA variants produced in Reference Example 6-1 were examined for whether they acquired protease resistance so that their fragmentation would be inhibited. The protease used was Lys-C (Endoproteinase Lys-C Sequencing Grade) (SIGMA; 11047825001). Reaction was performed under the conditions of 2 ng/microliter protease, 100 microgram/mL antibody, 80% 25 mM Tris-HCl pH 8.0, 20% PBS, and 35 degrees C. for two hours, or under the conditions of 2 ng/microliter protease, 20 microgram/mL antibody, 80% 25 mM Tris-HCl pH 8.0, 20% PBS, and 35 degrees C. for one hour. The sample was then subjected to non-reducing capillary electrophoresis. Wes (Protein Simple) was used for capillary electrophoresis, and an HRP-labeled anti-kappa chain antibody (abcam; ab46527) was used for detection. The results are shown in FIGS. 24 to 43. Lys-C treatment of MRA caused cleavage of the heavy chain hinge region, resulting in disappearance of the band of IgG at around 150 kDa and appearance of the band of Fab at around 50 kDa. For the MRA variants produced in Reference Example 6-1, some showed the band of Fab dimer appearing at around 96 kDa and some showed the band of undigested IgG detected at around 150 kDa after the protease treatment. The area of each band obtained after the protease treatment was outputted using software dedicated for Wes (Compass for SW; Protein Simple) to calculate the percentage of the band areas of undigested IgG, Fab dimer, etc. The calculated percentage of each band is shown in Table 26.

TABLE 26

| | | | | Heavy | Light |
|---|---|---|---|---|---|
| | | | | chain | chain |
| | IgG | Fab-Fab | Fab | SEQ ID | SEQ ID |
| Antibody name | (%) | (%) | (%) | NO: | NO: |
| MRAL.T5C-k0 | 0.1 | 0 | 71.1 | 15 | 156 |
| MRAL.Q6C-k0 | 0.1 | 0 | 74.5 | 15 | 157 |
| MRAL.S7C-k0 | 0.2 | 0 | 68.8 | 15 | 158 |
| MRAL.P8C-k0 | no data | no data | no data | 15 | 159 |
| MRAL.S9C-k0 | 0.3 | 0.4 | 82.9 | 15 | 160 |
| MRAL.S10C-k0 | 0.2 | 0.4 | 85.8 | 15 | 161 |
| MRAL.L11C-k0 | 0 | 0 | 83.4 | 15 | 162 |
| MRAL.S12C-k0 | 0.9 | 0.4 | 87.2 | 15 | 163 |
| MRAL.A13C-k0 | 0.1 | 0 | 88.6 | 15 | 164 |
| MRAL.S14C-k0 | 0.3 | 0.6 | 85.9 | 15 | 165 |
| MRAL.V15C-k0 | 0.2 | 0 | 84.8 | 15 | 166 |
| MRAL.G16C-k0 | 0.8 | 0 | 82.3 | 15 | 167 |
| MRAL.D17C-k0 | 0 | 0 | 92.3 | 15 | 168 |
| MRAL.R18C-k0 | 0.2 | 0.4 | 87.1 | 15 | 169 |
| MRAL.V19C-k0 | 0 | 0 | 63.3 | 15 | 170 |
| MRAL.T20C-k0 | 0.5 | 0.6 | 83.6 | 15 | 171 |
| MRAL.I21C-k0 | 0 | 0 | 5 | 15 | 172 |
| MRAL.T22C-k0 | 0 | 0.3 | 89.5 | 15 | 173 |
| MRAL.G57C-k0 | 0.2 | 0 | 91.7 | 15 | 174 |
| MRAL.V58C-k0 | 0.4 | 0.7 | 88 | 15 | 175 |
| MRAL.P59C-k0 | 0.7 | 1.5 | 94.6 | 15 | 176 |
| MRAL.S60C-k0 | 0.1 | 0 | 86.9 | 15 | 177 |
| MRAL.R61C-k0 | 0 | 0.3 | 86.9 | 15 | 178 |
| MRAL.F62C-k0 | 0.2 | 0 | 60 | 15 | 179 |
| MRAL.S63C-k0 | 0.5 | 0.6 | 88.1 | 15 | 180 |
| MRAL.S65C-k0 | 0.4 | 0.8 | 83.3 | 15 | 181 |
| MRAL.S67C-k0 | 1.5 | 0 | 72.8 | 15 | 182 |
| MRAL.G68C-k0 | 0.7 | 0.9 | 83.9 | 15 | 183 |
| MRAL.T69C-k0 | 1.1 | 0.6 | 86.4 | 15 | 184 |
| MRAL.D70C-k0 | 0.8 | 0.9 | 88.2 | 15 | 185 |
| MRAL.T72C-k0 | 0.6 | 0.7 | 90.1 | 15 | 186 |
| MRAL.F73C-k0 | 0.3 | 0 | 59.5 | 15 | 187 |
| MRAL.T74C-k0 | 0.2 | 0.6 | 95.6 | 15 | 188 |
| MRAL.I75C-k0 | no data | no data | no data | 15 | 189 |
| MRAL.S76C-k0 | 0.6 | 0.8 | 90.4 | 15 | 190 |
| MRAL.S77C-k0 | 1.1 | 0 | 74.2 | 15 | 191 |
| MRAL.L78C-k0 | 4.9 | 0 | 54.7 | 15 | 192 |
| MRAL.Q79C-k0 | 1.2 | 0.6 | 93.1 | 15 | 193 |
| MRAL.F98C-k0 | 0.6 | 0.8 | 71.8 | 15 | 194 |
| MRAL.G99C-k0 | 0.6 | 0.4 | 88.2 | 15 | 195 |
| MRAL.Q100C-k0 | 5 | 0.8 | 85 | 15 | 196 |
| MRAL.G101C-k0 | 0.3 | 0.4 | 98.1 | 15 | 197 |
| MRAL.T102C-k0 | 0.3 | 0 | 52.8 | 15 | 198 |
| MRAL.K103C-k0 | 1.1 | 0.4 | 89.2 | 15 | 199 |
| MRAL.V104C-k0 | 0.2 | 0.6 | 48.2 | 15 | 200 |
| MRAL.E105C-k0 | 90.8 | 0 | 1.2 | 15 | 201 |
| MRAL.I106C-k0 | 1.8 | 0 | 47.3 | 15 | 202 |
| MRAL.K107C-k0 | 5.4 | 0 | 82.6 | 15 | 203 |
| MRAL.A25C-k0 | 0.1 | 0.5 | 80 | 15 | 204 |
| MRAL.S26C-k0 | 0.3 | 1.4 | 94 | 15 | 205 |
| MRAL.Q27C-k0 | 0.3 | 1.3 | 94.6 | 15 | 206 |
| MRAL.Y32C-k0 | 0 | 1.2 | 95.7 | 15 | 207 |
| MRAL.L33C-k0 | 0 | 0 | 79.2 | 15 | 208 |
| MRAL.N34C-k0 | 0.3 | 0.4 | 95.7 | 15 | 209 |
| MRAL.Y50C-k0 | 0.4 | 1.3 | 97 | 15 | 210 |
| MRAL.T51C-k0 | 0.2 | 1.2 | 96.9 | 15 | 211 |
| MRAL.H55C-k0 | 0.2 | 1.5 | 95.7 | 15 | 212 |
| MRAL.S56C-k0 | 0.1 | 0.8 | 97 | 15 | 213 |
| MRAL.Y96C-k0 | 0.1 | 0.2 | 91.3 | 15 | 214 |
| MRAL.T97C-k0 | 0.3 | 0.9 | 97.5 | 15 | 215 |
| MRAL-k0.R108C | no data | no data | no data | 15 | 216 |
| MRAL-k0.T109C | 0.5 | 16 | 74.5 | 15 | 217 |
| MRAL-k0.V110C | 1.2 | 4 | 75 | 15 | 218 |
| MRAL-k0.A111C | 0.2 | 0.7 | 85.9 | 15 | 219 |
| MRAL-k0.A112C | 3.3 | 6.1 | 80.3 | 15 | 220 |
| MRAL-k0.P113C | no data | no data | no data | 15 | 221 |
| MRAL-k0.S114C | 0.3 | 0.7 | 94 | 15 | 222 |
| MRAL-k0.V115C | 0 | 0.1 | 34.9 | 15 | 223 |
| MRAL-k0.F116C | 0.3 | 0.3 | 77.3 | 15 | 224 |
| MRAL-k0.P120C | 0 | 0 | 28.8 | 15 | 225 |
| MRAL-k0.S121C | 8.6 | 0 | 57.4 | 15 | 226 |
| MRAL-k0.D122C | 1.8 | 0.1 | 30.3 | 15 | 227 |
| MRAL-k0.E123C | 2.3 | 1.6 | 75.9 | 15 | 228 |
| MRAL-k0.Q124C | 1.3 | 0.9 | 50.4 | 15 | 229 |
| MRAL-k0.L125C | 0.4 | 0.1 | 66.6 | 15 | 230 |
| MRAL-k0.K126C | 59.3 | 9.9 | 16.5 | 15 | 231 |
| MRAL-k0.S127C | 0.3 | 0.9 | 79 | 15 | 232 |
| MRAL-k0.G128C | 0.2 | 7 | 71.5 | 15 | 233 |
| MRAL-k0.T129C | 0 | 0.4 | 76.2 | 15 | 234 |
| MRAL-k0.A130C | 0 | 0 | 49.9 | 15 | 235 |
| MRAL-k0.S131C | 0 | 0 | 16.7 | 15 | 236 |
| MRAL-k0.L136C | 0 | 0 | 15 | 15 | 237 |
| MRAL-k0.N137C | 0 | 0 | 47.5 | 15 | 238 |
| MRAL-k0.N138C | 0 | 0.5 | 86.8 | 15 | 239 |
| MRAL-k0.F139C | 0 | 0 | 0 | 15 | 240 |
| MRAL-k0.Y140C | 0 | 0 | 29.9 | 15 | 241 |
| MRAL-k0.P141C | 0.1 | 2.7 | 79.8 | 15 | 242 |
| MRAL-k0.R142C | 0 | 0.6 | 74.1 | 15 | 243 |
| MRAL-k0.E143C | 0 | 0.5 | 88.4 | 15 | 244 |
| MRAL-k0.A144C | 0 | 0.1 | 42.1 | 15 | 245 |
| MRAL-k0.K145C | 0 | 0.9 | 82.8 | 15 | 246 |
| MRAL-k0.V146C | 0 | 0 | 26.5 | 15 | 247 |
| MRAL-k0.Q147C | 0 | 1.8 | 78.5 | 15 | 248 |
| MRAL-k0.W148C | no data | no data | no data | 15 | 249 |
| MRAL-k0.K149C | 0 | 0.6 | 79.5 | 15 | 250 |
| MRAL-k0.V150C | 0 | 0 | 34.8 | 15 | 251 |
| MRAL-k0.D151C | 2.7 | 14.9 | 66.5 | 15 | 252 |
| MRAL-k0.N152C | 1.2 | 58.4 | 26.8 | 15 | 253 |
| MRAL-k0.A153C | 0 | 7.1 | 71.8 | 15 | 254 |
| MRAL-k0.L154C | 0 | 2.3 | 66.5 | 15 | 255 |
| MRAL-k0.Q155C | 0 | 0.6 | 73.3 | 15 | 256 |
| MRAL-k0.S156C | 0.3 | 32.3 | 40.5 | 15 | 257 |
| MRAL-k0.G157C | 0 | 1.4 | 71.8 | 15 | 258 |
| MRAL-k0.N158C | 0 | 0.7 | 76.2 | 15 | 259 |
| MRAL-k0.S159C | 0 | 1.1 | 74.7 | 15 | 260 |
| MRAL-k0.Q160C | 0 | 1.5 | 78.5 | 15 | 261 |
| MRAL-k0.E161C | 0 | 1 | 79.8 | 15 | 262 |
| MRAL-k0.S162C | 0.6 | 1.6 | 86.7 | 15 | 263 |
| MRAL-k0.V163C | 0 | 1.7 | 87.1 | 15 | 264 |
| MRAL-k0.T164C | 0 | 2.6 | 84.3 | 15 | 265 |
| MRAL-k0.E165C | 0 | 0.6 | 89.5 | 15 | 266 |
| MRAL-k0.Q166C | 0 | 2 | 86.2 | 15 | 267 |
| MRAL-k0.D167C | 0 | 0.5 | 90.5 | 15 | 268 |
| MRAL-k0.S168C | 0 | 0.8 | 94.1 | 15 | 269 |
| MRAL-k0.K169C | 0 | 0.4 | 95.3 | 15 | 270 |
| MRAL-k0.D170C | 0.2 | 0.1 | 96 | 15 | 271 |
| MRAL-k0.S171C | 0 | 0.1 | 93.8 | 15 | 272 |
| MRAL-k0.T172C | 0 | 0 | 77.4 | 15 | 273 |
| MRAL-k0.Y173C | no data | no data | no data | 15 | 274 |
| MRAL-k0.S174C | 0 | 0 | 65.8 | 15 | 275 |
| MRAL-k0.L175C | 0 | 0.2 | 59.3 | 15 | 276 |
| MRAL-k0.T180C | 0 | 0.3 | 93.3 | 15 | 277 |
| MRAL-k0.L181C | 1.3 | 0.6 | 86.4 | 15 | 278 |
| MRAL-k0.S182C | 0.9 | 1.9 | 95 | 15 | 279 |
| MRAL-k0.K183C | 4.4 | 0.9 | 90.7 | 15 | 280 |
| MRAL-k0.A184C | 1.6 | 27.9 | 67.7 | 15 | 281 |
| MRAL-k0.D185C | 0.5 | 1.1 | 96.5 | 15 | 282 |
| MRAL-k0.Y186C | 2.4 | 18.9 | 67.4 | 15 | 283 |
| MRAL-k0.E187C | 2.3 | 0 | 11.2 | 15 | 284 |
| MRAL-k0.K188C | 1.8 | 8.6 | 85.8 | 15 | 285 |
| MRAL-k0.H189C | 1 | 0.8 | 93 | 15 | 286 |
| MRAL-k0.K190C | 25.5 | 0.2 | 11.4 | 15 | 287 |
| MRAL-k0.V191C | 2.8 | 1.6 | 84 | 15 | 288 |
| MRAL-k0.Y192C | 0.4 | 1.1 | 67.5 | 15 | 289 |
| MRAL-k0.A193C | 1.7 | 1.4 | 94.5 | 15 | 290 |
| MRAL-k0.E195C | 0.9 | 1.7 | 95.5 | 15 | 291 |
| MRAL-k0.V196C | 1 | 1.1 | 67.5 | 15 | 292 |
| MRAL-k0.T197C | 0.8 | 1.5 | 94.8 | 15 | 293 |
| MRAL-k0.H198C | 0.7 | 1.3 | 85 | 15 | 294 |
| MRAL-k0.Q199C | 1.4 | 2.5 | 92.9 | 15 | 295 |
| MRAL-k0.G200C | 7.3 | 14.8 | 75.6 | 15 | 296 |
| MRAL-k0.L201C | 1.7 | 5 | 88 | 15 | 297 |
| MRAL-k0.S202C | 2.8 | 46.4 | 49.4 | 15 | 298 |
| MRAL-k0.S203C | 9.1 | 0 | 87.1 | 15 | 299 |
| MRAL-k0.P204C | 1 | 0 | 95.8 | 15 | 300 |
| MRAL-k0.V205C | 1.7 | 1 | 88.4 | 15 | 301 |
| MRAL-k0.T206C | 1.4 | 0.7 | 90.1 | 15 | 302 |
| MRAL-k0.K207C | 3.2 | 0.5 | 79.8 | 15 | 303 |
| MRAL-k0.S208C | 7.7 | 0.8 | 77.8 | 15 | 304 |
| MRAL-k0.F209C | 0 | 0 | 37.2 | 15 | 305 |
| MRAL-k0.N210C | 22.8 | 0 | 20.2 | 15 | 306 |
| MRAL-k0.R211C | 9.2 | 0 | 59.7 | 15 | 307 |
| MRAL-k0.G212C | 58.9 | 0 | 28.7 | 15 | 308 |
| MRAL-k0.E213C | 55.1 | 0 | 12.1 | 15 | 309 |

[0996] From this result, it was found that cysteine substitution in the light chain variable region or light chain constant region improved the protease resistance of the heavy chain hinge region in the MRA variants shown in Table 27. Alternatively, the result suggested that a Fab dimer was formed by a covalent bond between the Fab-Fab.

TABLE 27
MRA variants

SEQ ID NO:

| | Heavy | Heavy | Light | Light |
|---|---|---|---|---|
| | chain | chain | chain | chain |
| | variable | constant | variable | constant |
| Antibody name | region | region | region | region |
| MRAL.Q100C-k0 | 17 | 18 | 196 | 20 |
| MRAL.E105C-k0 | 17 | 18 | 201 | 20 |
| MRAL.K107C-k0 | 17 | 18 | 203 | 20 |
| MRAL-k0.T109C | 17 | 18 | 19 | 217 |
| MRAL-k0.A112C | 17 | 18 | 19 | 220 |
| MRAL-k0.S121C | 17 | 18 | 19 | 226 |
| MRAL-k0.K126C | 17 | 18 | 19 | 231 |
| MRAL-k0.G128C | 17 | 18 | 19 | 233 |
| MRAL-k0.D151C | 17 | 18 | 19 | 252 |
| MRAL-k0.N152C | 17 | 18 | 19 | 253 |
| MRAL-k0.A153C | 17 | 18 | 19 | 254 |
| MRAL-k0.S156C | 17 | 18 | 19 | 257 |
| MRAL-k0.A184C | 17 | 18 | 19 | 281 |
| MRAL-k0.Y186C | 17 | 18 | 19 | 283 |
| MRAL-k0.K188C | 17 | 18 | 19 | 285 |
| MRAL-k0.K190C | 17 | 18 | 19 | 287 |
| MRAL-k0.G200C | 17 | 18 | 19 | 296 |
| MRAL-k0.L201C | 17 | 18 | 19 | 297 |
| MRAL-k0.S202C | 17 | 18 | 19 | 298 |
| MRAL-k0.S203C | 17 | 18 | 19 | 299 |
| MRAL-k0.S208C | 17 | 18 | 19 | 304 |
| MRAL-k0.N210C | 17 | 18 | 19 | 306 |
| MRAL-k0.R211C | 17 | 18 | 19 | 307 |
| MRAL-k0.G212C | 17 | 18 | 19 | 308 |
| MRAL-k0.E213C | 17 | 18 | 19 | 309 |

### Reference Example 7 Study of Methods for Assessing Antibodies Having Cysteine Substitution

### Reference Example 7-1 Production of Antibodies Having Cysteine Substitution in the Light Chain

[0997] The amino acid residue at position 126 according to Kabat numbering in the light chain constant region (k0, SEQ ID NO: 20) of MRA, an anti-human IL6R neutralizing antibody (heavy chain: MRAH-G1T4 (SEQ ID NO: 15), light chain: MRAL-k0 (SEQ ID NO: 16)), was substituted with cysteine to produce a variant of the light chain constant region of MRA, k0.K126C (SEQ ID No: 231). This variant of the light chain constant region of MRA was linked with the MRA light chain variable region (MRAL, SEQ ID NO: 19) to produce a variant of the light chain of MRA, and an expression vector encoding the corresponding gene was produced by a method known to the person skilled in the art.

[0998] The MRA light chain variant produced above was combined with the MRA heavy chain. The resultant MRA variant MRAL-k0.K126C (heavy chain: MRAH-G1T4 (SEQ ID NO: 15), light chain variable region: MRAL (SEQ ID NO: 19), light chain constant region: k0.K126C (SEQ ID NO: 231)) was expressed by transient expression using FreeStyle293 cells (Invitrogen) or Expi293 cells (Life technologies) by a method known to the person skilled in the art, and purified with Protein A by a method known to the person skilled in the art.

### Reference Example 7-2 Assessment of Protease-Mediated Capillary Electrophoresis of Antibodies Having Cysteine Substitution in the Light Chain

[0999] Using a protease that cleaves the heavy chain hinge region of antibody to cause Fab fragmentation, the MRA light chain variant produced in Reference Example 7-1 was examined for whether it acquired protease resistance so that its fragmentation would be inhibited. The protease used was Lys-C (Endoproteinase Lys-C Sequencing Grade) (SIGMA; 11047825001). Reaction was performed under the conditions of 0.1, 0.4, 1.6, or 6.4 ng/microliter protease, 100 microgram/mL antibody, 80% 25 mM Tris-HCl pH 8.0, 20% PBS, and 35 degrees C. for two hours. The sample was then subjected to non-reducing capillary electrophoresis. Wes (Protein Simple) was used for capillary electrophoresis, and an HRP-labeled anti-kappa chain antibody (abcam; ab46527) or an HRP-labeled anti-human Fc antibody (Protein Simple; 043-491) was used for detection. The result is shown in FIG. 44. For MRA treated with Lys-C, detection with the anti-kappa chain antibody showed disappearance of the band at around 150 kDa and appearance of a new band at around 50 kDa, and, at low Lys-C concentrations, also showed appearance of a slight band at 113 kDa. Detection with the anti-human Fc antibody showed disappearance of the band at around 150 kDa and appearance of a new band at around 61 kDa, and, at low Lys-C concentrations, also showed appearance of a slight band at 113 kDa. For the MRA variant produced in Reference Example 7-1, on the other hand, the band at around 150 kDa hardly disappeared, and a new band appeared at around 96 kDa. Detection with the anti-human Fc antibody showed that the band at around 150 kDa hardly disappeared and a new band appeared at around 61 kDa, and, at low Lys-C concentrations, a slight band also appeared at 113 kDa. The above results suggested that, as shown in FIG. 45, the band at around 150 kDa was IgG, the band at around 113 kDa was a one-arm form in which the heavy chain hinge was cleaved once, the band at around 96 kDa was a Fab dimer, the band at around 61 kDa was Fc, and the band at around 50 kDa was Fab.

### Reference Example 8 Assessment of Antibodies Having Cysteine Substitution at Various Positions of IgG1

### Reference Example 8-1 Production of Antibodies Having Cysteine Substitution at Various Positions of IgG1

[1000] The heavy chain and light chain of an anti-human IL6R neutralizing antibody, MRA-IgG1 (heavy chain: MRAH-G1T4 (SEQ ID NO: 15), light chain: MRAL-k0 (SEQ ID NO: 16)), were subjected to a study in which an arbitrary amino acid residue structurally exposed to the surface was substituted with cysteine.

[1001] Amino acid residues within the MRA-IgG1 heavy chain variable region (MRAH, SEQ ID NO: 17) were substituted with cysteine to produce variants of the MRA-IgG1 heavy chain variable region shown in Table 28. These variants of the MRA-IgG1 heavy chain variable region were each linked with the MRA-IgG1 heavy chain constant region (G1T4, SEQ ID NO: 18) to produce MRA-IgG1 heavy chain variants, and expression vectors encoding the corresponding genes were produced by a method known to the person skilled in the art. In addition, amino acid residues within the MRA-IgG1 heavy chain constant region (G1T4, SEQ ID NO: 18) were substituted with cysteine to produce variants of the MRA-IgG1 heavy chain constant region shown in Table 29. These variants of the MRA-IgG1 heavy chain constant region were each linked with the MRA-IgG1 heavy chain variable region (MRAH, SEQ ID NO: 17) to produce MRA-IgG1 heavy chain variants, and expression vectors encoding the corresponding genes were produced by a method known to the person skilled in the art.

TABLE 28

| Variant of MRA-IgG1 | Position of cysteine | |
|---|---|---|
| heavy chain variable | substitution | SEQ ID |
| region | (Kabat numbering) | NO: |
| MRAH.Q5C | 5 | 322 |
| MRAH.E6C | 6 | 323 |
| MRAH.S7C | 7 | 324 |
| MRAH.G8C | 8 | 325 |
| MRAH.P9C | 9 | 326 |
| MRAH.G10C | 10 | 327 |
| MRAH.L11C | 11 | 328 |
| MRAH.V12C | 12 | 329 |
| MRAH.R13C | 13 | 330 |
| MRAH.P14C | 14 | 331 |
| MRAH.S15C | 15 | 332 |
| MRAH.Q16C | 16 | 333 |
| MRAH.T17C | 17 | 334 |
| MRAH.L18C | 18 | 335 |
| MRAH.S19C | 19 | 336 |
| MRAH.L20C | 20 | 337 |
| MRAH.T21C | 21 | 338 |
| MRAH.T23C | 23 | 339 |
| MRAH.S25C | 25 | 340 |
| MRAH.G26C | 26 | 341 |
| MRAH.S28C | 28 | 342 |
| MRAH.T30C | 30 | 343 |
| MRAH.S31C | 31 | 344 |
| MRAH.W35C | 35 | 345 |
| MRAH.S35aC | 35a | 346 |
| MRAH.Y50C | 50 | 347 |
| MRAH.I51C | 51 | 348 |
| MRAH.S52C | 52 | 349 |
| MRAH.S62C | 62 | 350 |
| MRAH.L63C | 63 | 351 |
| MRAH.K64C | 64 | 352 |
| MRAH.S65C | 65 | 353 |
| MRAH.R66C | 66 | 354 |
| MRAH.V67C | 67 | 355 |
| MRAH.T68C | 68 | 356 |
| MRAH.L70C | 70 | 357 |
| MRAH.D72C | 72 | 358 |
| MRAH.T73C | 73 | 359 |
| MRAH.S74C | 74 | 360 |
| MRAH.K75C | 75 | 361 |
| MRAH.N76C | 76 | 362 |
| MRAH.Q77C | 77 | 363 |
| MRAH.S79C | 79 | 364 |
| MRAH.L80C | 80 | 365 |
| MRAH.R81C | 81 | 366 |
| MRAH.L82C | 82 | 367 |
| MRAH.S82aC | 82a | 368 |
| MRAH.S82bC | 82b | 369 |
| MRAH.V82cC | 82c | 370 |
| MRAH.D101C | 101 | 371 |
| MRAH.Y102C | 102 | 372 |
| MRAH.S112C | 112 | 373 |
| MRAH.S113C | 113 | 374 |

TABLE 29

| Variant of MRA-IgG1 | Position of cysteine | |
|---|---|---|
| heavy chain constant | substitution | SEQ ID |
| region | (EU numbering) | NO: |
| G1T4.A118C | 118 | 375 |
| G1T4.S119C | 119 | 376 |
| G1T4.T120C | 120 | 377 |
| G1T4.K121C | 121 | 378 |
| G1T4.G122C | 122 | 379 |
| G1T4.P123C | 123 | 380 |
| G1T4.S124C | 124 | 381 |
| G1T4.V125C | 125 | 382 |
| G1T4.F126C | 126 | 383 |
| G1T4.P127C | 127 | 384 |
| G1T4.S131C | 131 | 385 |
| G1T4.S132C | 132 | 386 |
| G1T4.K133C | 133 | 387 |
| G1T4.S134C | 134 | 388 |
| G1T4.T135C | 135 | 389 |
| G1T4.S136C | 136 | 390 |
| G1T4.G137C | 137 | 391 |
| G1T4.G138C | 138 | 392 |
| G1T4.T139C | 139 | 393 |
| G1T4.A140C | 140 | 394 |
| G1T4.A141C | 141 | 395 |
| G1T4.D148C | 148 | 396 |
| G1T4.Y149C | 149 | 397 |
| G1T4.F150C | 150 | 398 |
| G1T4.P151C | 151 | 399 |
| G1T4.E152C | 152 | 400 |
| G1T4.P153C | 153 | 401 |
| G1T4.V154C | 154 | 402 |
| G1T4.T155C | 155 | 403 |
| G1T4.V156C | 156 | 404 |
| G1T4.S157C | 157 | 405 |
| G1T4.W158C | 158 | 406 |
| G1T4.N159C | 159 | 407 |
| G1T4.S160C | 160 | 408 |
| G1T4.G161C | 161 | 409 |
| G1T4.A162C | 162 | 410 |
| G1T4.L163C | 163 | 411 |
| G1T4.T164C | 164 | 412 |
| G1T4.S165C | 165 | 413 |
| G1T4.G166C | 166 | 414 |
| G1T4.V167C | 167 | 415 |
| G1T4.V173C | 173 | 416 |
| G1T4.L174C | 174 | 417 |
| G1T4.Q175C | 175 | 418 |
| G1T4.S176C | 176 | 419 |
| G1T4.S177C | 177 | 420 |
| G1T4.G178C | 178 | 421 |
| G1T4.L179C | 179 | 422 |
| G1T4.Y180C | 180 | 423 |
| G1T4.V186C | 186 | 424 |
| G1T4.T187C | 187 | 425 |
| G1T4.V188C | 188 | 426 |
| G1T4.P189C | 189 | 427 |
| G1T4.S190C | 190 | 428 |
| G1T4.S191C | 191 | 429 |
| G1T4.S192C | 192 | 430 |
| G1T4.L193C | 193 | 431 |
| G1T4.G194C | 194 | 432 |
| G1T4.T195C | 195 | 433 |
| G1T4.Q196C | 196 | 434 |
| G1T4.T197C | 197 | 435 |
| G1T4.Y198C | 198 | 436 |
| G1T4.I199C | 199 | 437 |
| G1T4.N201C | 201 | 438 |
| G1T4.V202C | 202 | 439 |
| G1T4.N203C | 203 | 440 |
| G1T4.H204C | 204 | 441 |
| G1T4.K205C | 205 | 442 |
| G1T4.P206C | 206 | 443 |
| G1T4.S207C | 207 | 444 |
| G1T4.N208C | 208 | 445 |
| G1T4.T209C | 209 | 446 |
| G1T4.K210C | 210 | 447 |
| G1T4.V211C | 211 | 448 |
| G1T4.D212C | 212 | 449 |
| G1T4.K213C | 213 | 450 |
| G1T4.R214C | 214 | 451 |
| G1T4.V215C | 215 | 452 |
| G1T4.E216C | 216 | 453 |
| G1T4.P217C | 217 | 454 |
| G1T4.K218C | 218 | 455 |
| G1T4.S219C | 219 | 456 |

[1002] Similarly, amino acid residues within the MRA-IgG1 light chain variable region (MRAL, SEQ ID NO: 19) were substituted with cysteine to produce variants of the MRA-IgG1 light chain variable region shown in Table 30. These variants of the MRA-IgG1 light chain variable region were each linked with the MRA-IgG1 light chain constant region (k0, SEQ ID NO: 20) to produce MRA-IgG1 light chain variants, and expression vectors encoding the corresponding genes were produced by a method known to the person skilled in the art. In addition, amino acid residues within the MRA-IgG1 light chain constant region (k0, SEQ ID NO: 20) were substituted with cysteine to produce variants of the MRA-IgG1 light chain constant region shown in Table 31. These variants of the MRA-IgG1 heavy chain constant region were each linked with the MRA-IgG1 light chain variable region (MRAL, SEQ ID NO: 19) to produce MRA-IgG1 light chain variants, and expression vectors encoding the corresponding genes were produced by a method known to the person skilled in the art.

TABLE 30

| Variant of MRA-IgG1 | Position of cysteine | |
|---|---|---|
| light chain variable | substitution | |
| region | (Kabat numbering) | SEQ ID NO: |
| MRAL.T5C | 5 | 457 |
| MRAL.Q6C | 6 | 458 |
| MRAL.S7C | 7 | 459 |
| MRAL.P8C | 8 | 460 |
| MRAL.S9C | 9 | 461 |
| MRAL.S10C | 10 | 462 |
| MRAL.L11C | 11 | 463 |
| MRAL.S12C | 12 | 464 |
| MRAL.A13C | 13 | 465 |
| MRAL.S14C | 14 | 466 |
| MRAL.V15C | 15 | 467 |
| MRAL.G16C | 16 | 468 |
| MRAL.D17C | 17 | 469 |
| MRAL.R18C | 18 | 470 |
| MRAL.V19C | 19 | 471 |
| MRAL.T20C | 20 | 472 |
| MRAL.I21C | 21 | 473 |
| MRAL.T22C | 22 | 474 |
| MRAL.A25C | 25 | 475 |
| MRAL.S26C | 26 | 476 |
| MRAL.Q27C | 27 | 477 |
| MRAL.Y32C | 32 | 478 |
| MRAL.L33C | 33 | 479 |
| MRAL.N34C | 34 | 480 |
| MRAL.Y50C | 50 | 481 |
| MRAL.T51C | 51 | 482 |
| MRAL.H55C | 55 | 483 |
| MRAL.S56C | 56 | 484 |
| MRAL.G57C | 57 | 485 |
| MRAL.V58C | 58 | 486 |
| MRAL.P59C | 59 | 487 |
| MRAL.S60C | 60 | 488 |
| MRAL.R61C | 61 | 489 |
| MRAL.F62C | 62 | 490 |
| MRAL.S63C | 63 | 491 |
| MRAL.S65C | 65 | 492 |
| MRAL.S67C | 67 | 493 |
| MRAL.G68C | 68 | 494 |
| MRAL.T69C | 69 | 495 |
| MRAL.D70C | 70 | 496 |
| MRAL.T72C | 72 | 497 |
| MRAL.F73C | 73 | 498 |
| MRAL.T74C | 74 | 499 |
| MRAL.I75C | 75 | 500 |
| MRAL.S76C | 76 | 501 |
| MRAL.S77C | 77 | 502 |
| MRAL.L78C | 78 | 503 |
| MRAL.Q79C | 79 | 504 |
| MRAL.Y96C | 96 | 505 |
| MRAL.T97C | 97 | 506 |
| MRAL.F98C | 98 | 507 |
| MRAL.G99C | 99 | 508 |
| MRAL.Q100C | 100 | 509 |
| MRAL.G101C | 101 | 510 |
| MRAL.T102C | 102 | 511 |
| MRAL.K103C | 103 | 512 |
| MRAL.V104C | 104 | 513 |
| MRAL.E105C | 105 | 514 |
| MRAL.I106C | 106 | 515 |
| MRAL.K107C | 107 | 516 |

TABLE 31

| Variant of MRA-IgG1 | Position of cysteine | |
|---|---|---|
| light chain constant | substitution | |
| region | (Kabat numbering) | SEQ ID NO: |
| k0.R108C | 108 | 517 |
| k0.T109C | 109 | 518 |
| k0.V110C | 110 | 519 |
| k0.A111C | 111 | 520 |
| k0.A112C | 112 | 521 |
| k0.P113C | 113 | 522 |
| k0.S114C | 114 | 523 |
| k0.V115C | 115 | 524 |
| k0.F116C | 116 | 525 |
| k0.P120C | 120 | 526 |
| k0.S121C | 121 | 527 |
| k0.D122C | 122 | 528 |
| k0.E123C | 123 | 529 |
| k0.Q124C | 124 | 530 |
| k0.L125C | 125 | 531 |
| k0.K126C | 126 | 532 |
| k0.S127C | 127 | 533 |
| k0.G128C | 128 | 534 |
| k0.T129C | 129 | 535 |
| k0.A130C | 130 | 536 |
| k0.S131C | 131 | 537 |
| k0.L136C | 136 | 538 |
| k0.N137C | 137 | 539 |
| k0.N138C | 138 | 540 |
| k0.F139C | 139 | 541 |
| k0.Y140C | 140 | 542 |
| k0.P141C | 141 | 543 |
| k0.R142C | 142 | 544 |
| k0.E143C | 143 | 545 |
| k0.A144C | 144 | 546 |
| k0.K145C | 145 | 547 |
| k0.V146C | 146 | 548 |
| k0.Q147C | 147 | 549 |
| k0.W148C | 148 | 550 |
| k0.K149C | 149 | 551 |
| k0.V15OC | 150 | 552 |
| k0.D151C | 151 | 553 |
| k0.N152C | 152 | 554 |
| k0.A153C | 153 | 555 |
| k0.L154C | 154 | 556 |
| k0.Q155C | 155 | 557 |
| k0.S156C | 156 | 558 |
| k0.G157C | 157 | 559 |
| k0.N158C | 158 | 560 |
| k0.S159C | 159 | 561 |
| k0.Q160C | 160 | 562 |
| k0.E161C | 161 | 563 |
| k0.S162C | 162 | 564 |
| k0.V163C | 163 | 565 |
| k0.T164C | 164 | 566 |
| k0.E165C | 165 | 567 |
| k0.Q166C | 166 | 568 |
| k0.D167C | 167 | 569 |
| k0.S168C | 168 | 570 |
| k0.K169C | 169 | 571 |
| k0.D170C | 170 | 572 |
| k0.S171C | 171 | 573 |
| k0.T172C | 172 | 574 |
| k0.Y173C | 173 | 575 |
| k0.S174C | 174 | 576 |
| k0.L175C | 175 | 577 |
| k0.T180C | 180 | 578 |
| k0.L181C | 181 | 579 |
| k0.S182C | 182 | 580 |
| k0.K183C | 183 | 581 |
| k0.A184C | 184 | 582 |
| k0.D185C | 185 | 583 |
| k0.Y186C | 186 | 584 |
| k0.E187C | 187 | 585 |
| k0.K188C | 188 | 586 |
| k0.H189C | 189 | 587 |
| k0.K190C | 190 | 588 |
| k0.V191C | 191 | 589 |
| k0.Y192C | 192 | 590 |
| k0.A193C | 193 | 591 |
| k0.E195C | 195 | 592 |
| k0.V196C | 196 | 593 |
| k0.T197C | 197 | 594 |
| k0.H198C | 198 | 595 |
| k0.Q199C | 199 | 596 |
| k0.G200C | 200 | 597 |
| k0.L201C | 201 | 598 |
| k0.S202C | 202 | 599 |
| k0.S203C | 203 | 600 |
| k0.P204C | 204 | 601 |
| k0.V205C | 205 | 602 |
| k0.T206C | 206 | 603 |
| k0.K207C | 207 | 604 |
| k0.S208C | 208 | 605 |
| k0.F209C | 209 | 606 |
| k0.N210C | 210 | 607 |
| k0.R211C | 211 | 608 |
| k0.G212C | 212 | 609 |
| k0.E213C | 213 | 610 |

[1003] The MRA-IgG1 heavy chain variants produced above were combined with the MRA-IgG1 light chain, or the MRA-IgG1 heavy chain was combined with the MRA-IgG1 light chain variants. The resultant MRA-IgG1 heavy chain variants and MRA-IgG1 light chain variants shown in Tables 32 and 33 were expressed by transient expression using FreeStyle293 cells (Invitrogen) or Expi293 cells (Life technologies) by a method known to the person skilled in the art, and purified with Protein A by a method known to the person skilled in the art.

TABLE 32

| | Heavy | Heavy | Light | Light |
|---|---|---|---|---|
| | chain | chain | chain | chain |
| | variable | constant | variable | constant |
| | region | region | region | region |
| MRA-IgG1 heavy chain | SEQ ID | SEQ ID | SEQ ID | SEQ ID |
| variant name | NO: | NO: | NO: | NO: |
| MRAH.Q5C-IgG1 | 322 | 18 | 19 | 20 |
| MRAH.E6C-IgG1 | 323 | 18 | 19 | 20 |
| MRAH.S7C-IgG1 | 324 | 18 | 19 | 20 |
| MRAH.G8C-IgG1 | 325 | 18 | 19 | 20 |
| MRAH.P9C-IgG1 | 326 | 18 | 19 | 20 |
| MRAH.G10C-IgG1 | 327 | 18 | 19 | 20 |
| MRAH.L11C-IgG1 | 328 | 18 | 19 | 20 |
| MRAH.V12C-IgG1 | 329 | 18 | 19 | 20 |
| MRAH.R13C-IgG1 | 330 | 18 | 19 | 20 |
| MRAH.P14C-IgG1 | 331 | 18 | 19 | 20 |
| MRAH.S15C-IgG1 | 332 | 18 | 19 | 20 |
| MRAH.Q16C-IgG1 | 333 | 18 | 19 | 20 |
| MRAH.T17C-IgG1 | 334 | 18 | 19 | 20 |
| MRAH.L18C-IgG1 | 335 | 18 | 19 | 20 |
| MRAH.S19C-IgG1 | 336 | 18 | 19 | 20 |
| MRAH.L20C-IgG1 | 337 | 18 | 19 | 20 |
| MRAH.T21C-IgG1 | 338 | 18 | 19 | 20 |
| MRAH.T23C-IgG1 | 339 | 18 | 19 | 20 |
| MRAH.S25C-IgG1 | 340 | 18 | 19 | 20 |
| MRAH.G26C-IgG1 | 341 | 18 | 19 | 20 |
| MRAH.S28C-IgG1 | 342 | 18 | 19 | 20 |
| MRAH.T30C-IgG1 | 343 | 18 | 19 | 20 |
| MRAH.S31C-IgG1 | 344 | 18 | 19 | 20 |
| MRAH.W35C-IgG1 | 345 | 18 | 19 | 20 |
| MRAH.S35aC-IgG1 | 346 | 18 | 19 | 20 |
| MRAH.Y50C-IgG1 | 347 | 18 | 19 | 20 |
| MRAH.I51C-IgG1 | 348 | 18 | 19 | 20 |
| MRAH.S52C-IgG1 | 349 | 18 | 19 | 20 |
| MRAH.S62C-IgG1 | 350 | 18 | 19 | 20 |
| MRAH.L63C-IgG1 | 351 | 18 | 19 | 20 |
| MRAH.K64C-IgG1 | 352 | 18 | 19 | 20 |
| MRAH.S65C-IgG1 | 353 | 18 | 19 | 20 |
| MRAH.R66C-IgG1 | 354 | 18 | 19 | 20 |
| MRAH.V67C-IgG1 | 355 | 18 | 19 | 20 |
| MRAH.T68C-IgG1 | 356 | 18 | 19 | 20 |
| MRAH.L70C-IgG1 | 357 | 18 | 19 | 20 |
| MRAH.D72C-IgG1 | 358 | 18 | 19 | 20 |
| MRAH.T73C-IgG1 | 359 | 18 | 19 | 20 |
| MRAH.S74C-IgG1 | 360 | 18 | 19 | 20 |
| MRAH.K75C-IgG1 | 361 | 18 | 19 | 20 |
| MRAH.N76C-IgG1 | 362 | 18 | 19 | 20 |
| MRAH.Q77C-IgG1 | 363 | 18 | 19 | 20 |
| MRAH.S79C-IgG1 | 364 | 18 | 19 | 20 |
| MRAH.L80C-IgG1 | 365 | 18 | 19 | 20 |
| MRAH.R81C-IgG1 | 366 | 18 | 19 | 20 |
| MRAH.L82C-IgG1 | 367 | 18 | 19 | 20 |
| MRAH.S82aC-IgG1 | 368 | 18 | 19 | 20 |
| MRAH.S82bC-IgG1 | 369 | 18 | 19 | 20 |
| MRAH.V82cC-IgG1 | 370 | 18 | 19 | 20 |
| MRAH.D101C-IgG1 | 371 | 18 | 19 | 20 |
| MRAH.Y102C-IgG1 | 372 | 18 | 19 | 20 |
| MRAH.S112C-IgG1 | 373 | 18 | 19 | 20 |
| MRAH.S113C-IgG1 | 374 | 18 | 19 | 20 |
| G1T4.A118C-IgG1 | 17 | 375 | 19 | 20 |
| G1T4.S119C-IgG1 | 17 | 376 | 19 | 20 |
| G1T4.T120C-IgG1 | 17 | 377 | 19 | 20 |
| G1T4.K121C-IgG1 | 17 | 378 | 19 | 20 |
| G1T4.G122C-IgG1 | 17 | 379 | 19 | 20 |
| G1T4.P123C-IgG1 | 17 | 380 | 19 | 20 |
| G1T4.S124C-IgG1 | 17 | 381 | 19 | 20 |
| G1T4.V125C-IgG1 | 17 | 382 | 19 | 20 |
| G1T4.F126C-IgG1 | 17 | 383 | 19 | 20 |
| G1T4.P127C-IgG1 | 17 | 384 | 19 | 20 |
| G1T4.S131C-IgG1 | 17 | 385 | 19 | 20 |
| G1T4.S132C-IgG1 | 17 | 386 | 19 | 20 |
| G1T4.K133C-IgG1 | 17 | 387 | 19 | 20 |
| G1T4.S134C-IgG1 | 17 | 388 | 19 | 20 |
| G1T4.T135C-IgG1 | 17 | 389 | 19 | 20 |
| G1T4.S136C-IgG1 | 17 | 390 | 19 | 20 |
| G1T4.G137C-IgG1 | 17 | 391 | 19 | 20 |
| G1T4.G138C-IgG1 | 17 | 392 | 19 | 20 |
| G1T4.T139C-IgG1 | 17 | 393 | 19 | 20 |
| G1T4.A140C-IgG1 | 17 | 394 | 19 | 20 |
| G1T4.A141C-IgG1 | 17 | 395 | 19 | 20 |
| G1T4.D148C-IgG1 | 17 | 396 | 19 | 20 |
| G1T4.Y149C-IgG1 | 17 | 397 | 19 | 20 |
| G1T4.F150C-IgG1 | 17 | 398 | 19 | 20 |
| G1T4.P151C-IgG1 | 17 | 399 | 19 | 20 |
| G1T4.E152C-IgG1 | 17 | 400 | 19 | 20 |
| G1T4.P153C-IgG1 | 17 | 401 | 19 | 20 |
| G1T4.V154C-IgG1 | 17 | 402 | 19 | 20 |
| G1T4.T155C-IgG1 | 17 | 403 | 19 | 20 |
| G1T4.V156C-IgG1 | 17 | 404 | 19 | 20 |
| G1T4.S157C-IgG1 | 17 | 405 | 19 | 20 |
| G1T4.W158C-IgG1 | 17 | 406 | 19 | 20 |
| G1T4.N159C-IgG1 | 17 | 407 | 19 | 20 |
| G1T4.S160C-IgG1 | 17 | 408 | 19 | 20 |
| G1T4.G161C-IgG1 | 17 | 409 | 19 | 20 |
| G1T4.A162C-IgG1 | 17 | 410 | 19 | 20 |
| G1T4.L163C-IgG1 | 17 | 411 | 19 | 20 |
| G1T4.T164C-IgG1 | 17 | 412 | 19 | 20 |
| G1T4.S165C-IgG1 | 17 | 413 | 19 | 20 |
| G1T4.G166C-IgG1 | 17 | 414 | 19 | 20 |
| G1T4.V167C-IgG1 | 17 | 415 | 19 | 20 |
| G1T4.V173C-IgG1 | 17 | 416 | 19 | 20 |
| G1T4.L174C-IgG1 | 17 | 417 | 19 | 20 |
| G1T4.Q175C-IgG1 | 17 | 418 | 19 | 20 |
| G1T4.S176C-IgG1 | 17 | 419 | 19 | 20 |
| G1T4.S177C-IgG1 | 17 | 420 | 19 | 20 |
| G1T4.G178C-IgG1 | 17 | 421 | 19 | 20 |
| G1T4.L179C-IgG1 | 17 | 422 | 19 | 20 |
| G1T4.Y180C-IgG1 | 17 | 423 | 19 | 20 |
| G1T4.V186C-IgG1 | 17 | 424 | 19 | 20 |
| G1T4.T187C-IgG1 | 17 | 425 | 19 | 20 |
| G1T4.V188C-IgG1 | 17 | 426 | 19 | 20 |
| G1T4.P189C-IgG1 | 17 | 427 | 19 | 20 |
| G1T4.S190C-IgG1 | 17 | 428 | 19 | 20 |
| G1T4.S191C-IgG1 | 17 | 429 | 19 | 20 |
| G1T4.S192C-IgG1 | 17 | 430 | 19 | 20 |
| G1T4.L193C-IgG1 | 17 | 431 | 19 | 20 |
| G1T4.G194C-IgG1 | 17 | 432 | 19 | 20 |
| G1T4.T195C-IgG1 | 17 | 433 | 19 | 20 |
| G1T4.Q196C-IgG1 | 17 | 434 | 19 | 20 |
| G1T4.T197C-IgG1 | 17 | 435 | 19 | 20 |
| G1T4.Y198C-IgG1 | 17 | 436 | 19 | 20 |
| G1T4.I199C-IgG1 | 17 | 437 | 19 | 20 |
| G1T4.N201C-IgG1 | 17 | 438 | 19 | 20 |
| G1T4.V202C-IgG1 | 17 | 439 | 19 | 20 |
| G1T4.N203C-IgG1 | 17 | 440 | 19 | 20 |
| G1T4.H204C-IgG1 | 17 | 441 | 19 | 20 |
| G1T4.K205C-IgG1 | 17 | 442 | 19 | 20 |
| G1T4.P206C-IgG1 | 17 | 443 | 19 | 20 |
| G1T4.S207C-IgG1 | 17 | 444 | 19 | 20 |
| G1T4.N208C-IgG1 | 17 | 445 | 19 | 20 |
| G1T4.T209C-IgG1 | 17 | 446 | 19 | 20 |
| G1T4.K210C-IgG1 | 17 | 447 | 19 | 20 |
| G1T4.V211C-IgG1 | 17 | 448 | 19 | 20 |
| G1T4.D212C-IgG1 | 17 | 449 | 19 | 20 |
| G1T4.K213C-IgG1 | 17 | 450 | 19 | 20 |
| G1T4.R214C-IgG1 | 17 | 451 | 19 | 20 |
| G1T4.V215C-IgG1 | 17 | 452 | 19 | 20 |
| G1T4.E216C-IgG1 | 17 | 453 | 19 | 20 |
| G1T4.P217C-IgG1 | 17 | 454 | 19 | 20 |
| G1T4.K218C-IgG1 | 17 | 455 | 19 | 20 |
| G1T4.S219C-IgG1 | 17 | 456 | 19 | 20 |

TABLE 33

| | Heavy | Heavy | Light | Light |
|---|---|---|---|---|
| | chain | chain | chain | chain |
| | variable | constant | variable | constant |
| | region | region | region | region |
| MRA-IgG1 light chain | SEQ ID | SEQ ID | SEQ ID | SEQ ID |
| variant name | NO: | NO: | NO: | NO: |
| MRAL.T5C-IgG1 | 17 | 18 | 457 | 20 |
| MRAL.Q6C-IgG1 | 17 | 18 | 458 | 20 |
| MRAL.S7C-IgG1 | 17 | 18 | 459 | 20 |
| MRAL.P8C-IgG1 | 17 | 18 | 460 | 20 |
| MRAL.S9C-IgG1 | 17 | 18 | 461 | 20 |
| MRAL.S10C-IgG1 | 17 | 18 | 462 | 20 |
| MRAL.L11C-IgG1 | 17 | 18 | 463 | 20 |
| MRAL.S12C-IgG1 | 17 | 18 | 464 | 20 |
| MRAL.A13C-IgG1 | 17 | 18 | 465 | 20 |
| MRAL.S14C-IgG1 | 17 | 18 | 466 | 20 |
| MRAL.V15C-IgG1 | 17 | 18 | 467 | 20 |
| MRAL.G16C-IgG1 | 17 | 18 | 468 | 20 |
| MRAL.D17C-IgG1 | 17 | 18 | 469 | 20 |
| MRAL.R18C-IgG1 | 17 | 18 | 470 | 20 |
| MRAL.V19C-IgG1 | 17 | 18 | 471 | 20 |
| MRAL.T20C-IgG1 | 17 | 18 | 472 | 20 |
| MRAL.I21C-IgG1 | 17 | 18 | 473 | 20 |
| MRAL.T22C-IgG1 | 17 | 18 | 474 | 20 |
| MRAL.A25C-IgG1 | 17 | 18 | 475 | 20 |
| MRAL.S26C-IgG1 | 17 | 18 | 476 | 20 |
| MRAL.Q27C-IgG1 | 17 | 18 | 477 | 20 |
| MRAL.Y32C-IgG1 | 17 | 18 | 478 | 20 |
| MRAL.L33C-IgG1 | 17 | 18 | 479 | 20 |
| MRAL.N34C-IgG1 | 17 | 18 | 480 | 20 |
| MRAL.Y50C-IgG1 | 17 | 18 | 481 | 20 |
| MRAL.T51C-IgG1 | 17 | 18 | 482 | 20 |
| MRAL.H55C-IgG1 | 17 | 18 | 483 | 20 |
| MRAL.S56C-IgG1 | 17 | 18 | 484 | 20 |
| MRAL.G57C-IgG1 | 17 | 18 | 485 | 20 |
| MRAL.V58C-IgG1 | 17 | 18 | 486 | 20 |
| MRAL.P59C-IgG1 | 17 | 18 | 487 | 20 |
| MRAL.S60C-IgG1 | 17 | 18 | 488 | 20 |
| MRAL.R61C-IgG1 | 17 | 18 | 489 | 20 |
| MRAL.F62C-IgG1 | 17 | 18 | 490 | 20 |
| MRAL.S63C-IgG1 | 17 | 18 | 491 | 20 |
| MRAL.S65C-IgG1 | 17 | 18 | 492 | 20 |
| MRAL.S67C-IgG1 | 17 | 18 | 493 | 20 |
| MRAL.G68C-IgG1 | 17 | 18 | 494 | 20 |
| MRAL.T69C-IgG1 | 17 | 18 | 495 | 20 |
| MRAL.D70C-IgG1 | 17 | 18 | 496 | 20 |
| MRAL.T72C-IgG1 | 17 | 18 | 497 | 20 |
| MRAL.F73C-IgG1 | 17 | 18 | 498 | 20 |
| MRAL.T74C-IgG1 | 17 | 18 | 499 | 20 |
| MRAL.I75C-IgG1 | 17 | 18 | 500 | 20 |
| MRAL.S76C-IgG1 | 17 | 18 | 501 | 20 |
| MRAL.S77C-IgG1 | 17 | 18 | 502 | 20 |
| MRAL.L78C-IgG1 | 17 | 18 | 503 | 20 |
| MRAL.Q79C-IgG1 | 17 | 18 | 504 | 20 |
| MRAL.Y96C-IgG1 | 17 | 18 | 505 | 20 |
| MRAL.T97C-IgG1 | 17 | 18 | 506 | 20 |
| MRAL.F98C-IgG1 | 17 | 18 | 507 | 20 |
| MRAL.G99C-IgG1 | 17 | 18 | 508 | 20 |
| MRAL.Q100C-IgG1 | 17 | 18 | 509 | 20 |
| MRAL.G101C-IgG1 | 17 | 18 | 510 | 20 |
| MRAL.T102C-IgG1 | 17 | 18 | 511 | 20 |
| MRAL.K103C-IgG1 | 17 | 18 | 512 | 20 |
| MRAL.V104C-IgG1 | 17 | 18 | 513 | 20 |
| MRAL.E105C-IgG1 | 17 | 18 | 514 | 20 |
| MRAL.I106C-IgG1 | 17 | 18 | 515 | 20 |
| MRAL.K107C-IgG1 | 17 | 18 | 516 | 20 |
| k0.R108C-IgG1 | 17 | 18 | 19 | 517 |
| k0.T109C-IgG1 | 17 | 18 | 19 | 518 |
| k0.V110C-IgG1 | 17 | 18 | 19 | 519 |
| k0.A111C-IgG1 | 17 | 18 | 19 | 520 |
| k0.A112C-IgG1 | 17 | 18 | 19 | 521 |
| k0.P113C-IgG1 | 17 | 18 | 19 | 522 |
| k0.S114C-IgG1 | 17 | 18 | 19 | 523 |
| k0.V115C-IgG1 | 17 | 18 | 19 | 524 |
| k0.F116C-IgG1 | 17 | 18 | 19 | 525 |
| k0.P120C-IgG1 | 17 | 18 | 19 | 526 |
| k0.S121C-IgG1 | 17 | 18 | 19 | 527 |
| k0.D122C-IgG1 | 17 | 18 | 19 | 528 |
| k0.E123C-IgG1 | 17 | 18 | 19 | 529 |
| k0.Q124C-IgG1 | 17 | 18 | 19 | 530 |
| k0.L125C-IgG1 | 17 | 18 | 19 | 531 |
| k0.K126C-IgG1 | 17 | 18 | 19 | 532 |
| k0.S127C-IgG1 | 17 | 18 | 19 | 533 |
| k0.G128C-IgG1 | 17 | 18 | 19 | 534 |
| k0.T129C-IgG1 | 17 | 18 | 19 | 535 |
| k0.A130C-IgG1 | 17 | 18 | 19 | 536 |
| k0.S131C-IgG1 | 17 | 18 | 19 | 537 |
| k0.L136C-IgG1 | 17 | 18 | 19 | 538 |
| k0.N137C-IgG1 | 17 | 18 | 19 | 539 |
| k0.N138C-IgG1 | 17 | 18 | 19 | 540 |
| k0.F139C-IgG1 | 17 | 18 | 19 | 541 |
| k0.Y140C-IgG1 | 17 | 18 | 19 | 542 |
| k0.P141C-IgG1 | 17 | 18 | 19 | 543 |
| k0.R142C-IgG1 | 17 | 18 | 19 | 544 |
| k0.E143C-IgG1 | 17 | 18 | 19 | 545 |
| k0.A144C-IgG1 | 17 | 18 | 19 | 546 |
| k0.K145C-IgG1 | 17 | 18 | 19 | 547 |
| k0.V146C-IgG1 | 17 | 18 | 19 | 548 |
| k0.Q147C-IgG1 | 17 | 18 | 19 | 549 |
| k0.W148C-IgG1 | 17 | 18 | 19 | 550 |
| k0.K149C-IgG1 | 17 | 18 | 19 | 551 |
| k0.V150C-IgG1 | 17 | 18 | 19 | 552 |
| k0.D151C-IgG1 | 17 | 18 | 19 | 553 |
| k0.N152C-IgG1 | 17 | 18 | 19 | 554 |
| k0.A153C-IgG1 | 17 | 18 | 19 | 555 |
| k0.L154C-IgG1 | 17 | 18 | 19 | 556 |
| k0.Q155C-IgG1 | 17 | 18 | 19 | 557 |
| k0.S156C-IgG1 | 17 | 18 | 19 | 558 |
| k0.G157C-IgG1 | 17 | 18 | 19 | 559 |
| k0.N158C-IgG1 | 17 | 18 | 19 | 560 |
| k0.S159C-IgG1 | 17 | 18 | 19 | 561 |
| k0.Q160C-IgG1 | 17 | 18 | 19 | 562 |
| k0.E161C-IgG1 | 17 | 18 | 19 | 563 |
| k0.S162C-IgG1 | 17 | 18 | 19 | 564 |
| k0.V163C-IgG1 | 17 | 18 | 19 | 565 |
| k0.T164C-IgG1 | 17 | 18 | 19 | 566 |
| k0.E165C-IgG1 | 17 | 18 | 19 | 567 |
| k0.Q166C-IgG1 | 17 | 18 | 19 | 568 |
| k0.D167C-IgG1 | 17 | 18 | 19 | 569 |
| k0.S168C-IgG1 | 17 | 18 | 19 | 570 |
| k0.K169C-IgG1 | 17 | 18 | 19 | 571 |
| k0.D170C-IgG1 | 17 | 18 | 19 | 572 |
| k0.S171C-IgG1 | 17 | 18 | 19 | 573 |
| k0.T172C-IgG1 | 17 | 18 | 19 | 574 |
| k0.Y173C-IgG1 | 17 | 18 | 19 | 575 |
| k0.S174C-IgG1 | 17 | 18 | 19 | 576 |
| k0.L175C-IgG1 | 17 | 18 | 19 | 577 |
| k0.T180C-IgG1 | 17 | 18 | 19 | 578 |
| k0.L181C-IgG1 | 17 | 18 | 19 | 579 |
| k0.S182C-IgG1 | 17 | 18 | 19 | 580 |
| k0.K183C-IgG1 | 17 | 18 | 19 | 581 |
| k0.A184C-IgG1 | 17 | 18 | 19 | 582 |
| k0.D185C-IgG1 | 17 | 18 | 19 | 583 |
| k0.Y186C-IgG1 | 17 | 18 | 19 | 584 |
| k0.E187C-IgG1 | 17 | 18 | 19 | 585 |
| k0.K188C-IgG1 | 17 | 18 | 19 | 586 |
| k0.H189C-IgG1 | 17 | 18 | 19 | 587 |
| k0.K190C-IgG1 | 17 | 18 | 19 | 588 |
| k0.V191C-IgG1 | 17 | 18 | 19 | 589 |
| k0.Y192C-IgG1 | 17 | 18 | 19 | 590 |
| k0.A193C-IgG1 | 17 | 18 | 19 | 591 |
| k0.E195C-IgG1 | 17 | 18 | 19 | 592 |
| k0.V196C-IgG1 | 17 | 18 | 19 | 593 |
| k0.T197C-IgG1 | 17 | 18 | 19 | 594 |
| k0.H198C-IgG1 | 17 | 18 | 19 | 595 |
| k0.Q199C-IgG1 | 17 | 18 | 19 | 596 |
| k0.G200C-IgG1 | 17 | 18 | 19 | 597 |
| k0.L201C-IgG1 | 17 | 18 | 19 | 598 |
| k0.S202C-IgG1 | 17 | 18 | 19 | 599 |
| k0.S203C-IgG1 | 17 | 18 | 19 | 600 |
| k0.P204C-IgG1 | 17 | 18 | 19 | 601 |
| k0.V205C-IgG1 | 17 | 18 | 19 | 602 |
| k0.T206C-IgG1 | 17 | 18 | 19 | 603 |
| k0.K207C-IgG1 | 17 | 18 | 19 | 604 |
| k0.S208C-IgG1 | 17 | 18 | 19 | 605 |
| k0.F209C-IgG1 | 17 | 18 | 19 | 606 |
| k0.N210C-IgG1 | 17 | 18 | 19 | 607 |
| k0.R211C-IgG1 | 17 | 18 | 19 | 608 |
| k0.G212C-IgG1 | 17 | 18 | 19 | 609 |
| k0.E213C-IgG1 | 17 | 18 | 19 | 610 |

### Reference Example 8-2 Assessment of Electrophoretic Mobility in Polyacrylamide Gel of Antibodies Having Cysteine Substitution at Various Positions of IgG1

[1004] It was examined with non-reducing SDS-PAGE whether the MRA-IgG1 variants produced in Reference Example 8-1 show a different electrophoretic mobility to MRA-IgG1. Sample Buffer Solution (2ME-) (×4) (Wako; 198-13282) was used for preparing electrophoresis samples, the samples were treated for 10 minutes under the condition of specimen concentration 50 microgram/mL and 70 degrees C., and then subjected to non-reducing SDS-PAGE. In non-reducing SDS-PAGE, electrophoresis was carried out for 90 minutes at 125 V, using 4% SDS-PAGE mini 15 well 1.0 mm 15 well (TEFCO; Cat #01-052-6). Then, the gel was stained with CBB stain, the gel image was captured with ChemiDocTouchMP (BIORAD), and the bands were quantified with Image Lab (BIORAD).

[1005] From the obtained gel image, the variants were classified into 7 groups according to the band pattern of each of the MRA-IgG1 variants: Single (one band at a molecular weight region similar to that of MRA-IgG1), Double (two bands at a molecular weight region similar to that of MRA-IgG1), Triple (three bands at a molecular weight region similar to that of MRA-IgG1), Several (four or more bands at a molecular weight region similar to that of MRA-IgG1), LMW (band(s) at a molecular weight region lower than that of MRA-IgG1), HMW (band(s) at a molecular weight region higher than that of MRA-IgG1), and Faint (band(s) blurry and difficult to determine). Regarding the MRA-IgG1 variants classified as “Double”, one of the two bands showed the same electrophoretic mobility as MRA-IgG1 while the other band showed slightly faster or slower mobility. Thus, for the MRA-IgG1 variants classified as “Double”, the percentage of the bands showing different mobility to MRA-IgG1 (percentage of new band (%)) was also calculated. Grouping of the band patterns for MRA-IgG1 heavy chain variants and MRA-IgG1 light chain variants, and the calculation results of the band percentage are respectively shown in Tables 34 and 35. From Tables 34 and 35, variants classified into the Double and Triple groups are shown in Table 36. In these variants, it is highly likely that cysteine substitution caused structural changes such as crosslinkage of Fabs, which resulted in the change in electrophoretic mobility. It is noted that while Table 35 indicates “no data” for MRAL.K107C-IgG1, position 107 (Kabat numbering), which is the position of cysteine substitution in this variant, is a position where the residue structurally exposed to the surface is present in the hinge region. Thus, in this variant also, it is highly likely that cysteine substitution causes structural changes such as crosslinkage of Fabs, and results in the change in electrophoretic mobility.

TABLE 34

| MRA-IgG1 heavy chain | | Percentage of new |
|---|---|---|
| variant name | Group | band (%) |
| MRAH.Q5C-IgG1 | Single | — |
| MRAH.E6C-IgG1 | Double | 30.7 |
| MRAH.S7C-IgG1 | Single | — |
| MRAH.G8C-IgG1 | Single | — |
| MRAH.P9C-IgG1 | Single | — |
| MRAH.G10C-IgG1 | Single | — |
| MRAH.L11C-IgG1 | Single | — |
| MRAH.V12C-IgG1 | Single | — |
| MRAH.R13C-IgG1 | Single | — |
| MRAH.P14C-IgG1 | Single | — |
| MRAH.S15C-IgG1 | Single | — |
| MRAH.Q16C-IgG1 | Single | — |
| MRAH.T17C-IgG1 | Single | — |
| MRAH.L18C-IgG1 | Faint | — |
| MRAH.S19C-IgG1 | Single | — |
| MRAH.L20C-IgG1 | Faint | — |
| MRAH.T21C-IgG1 | Single | — |
| MRAH.T23C-IgG1 | no data | — |
| MRAH.S25C-IgG1 | Double | 20.2 |
| MRAH.G26C-IgG1 | Double | 14.5 |
| MRAH.S28C-IgG1 | Single | — |
| MRAH.T30C-IgG1 | Single | — |
| MRAH.S31C-IgG1 | Single | — |
| MRAH.W35C-IgG1 | Faint | — |
| MRAH.S35aC-IgG1 | Faint | — |
| MRAH.Y50C-IgG1 | Single | — |
| MRAH.I51C-IgG1 | Faint | — |
| MRAH.S52C-IgG1 | Single | — |
| MRAH.S62C-IgG1 | Single | — |
| MRAH.L63C-IgG1 | Single | — |
| MRAH.K64C-IgG1 | Single | — |
| MRAH.S65C-IgG1 | Single | — |
| MRAH.R66C-IgG1 | Single | — |
| MRAH.V67C-IgG1 | Single | — |
| MRAH.T68C-IgG1 | Single | — |
| MRAH.L70C-IgG1 | no data | — |
| MRAH.D72C-IgG1 | Single | — |
| MRAH.T73C-IgG1 | Single | — |
| MRAH.S74C-IgG1 | Single | — |
| MRAH.K75C-IgG1 | Single | — |
| MRAH.N76C-IgG1 | Single | — |
| MRAH.Q77C-IgG1 | Single | — |
| MRAH.S79C-IgG1 | Single | — |
| MRAH.L80C-IgG1 | Faint | — |
| MRAH.R81C-IgG1 | Single | — |
| MRAH.L82C-IgG1 | Faint | — |
| MRAH.S82aC-IgG1 | Single | — |
| MRAH.S82bC-IgG1 | Single | — |
| MRAH.V82cC-IgG1 | Faint | — |
| MRAH.D101C-IgG1 | Single | — |
| MRAH.Y102C-IgG1 | Single | — |
| MRAH.S112C-IgG1 | Single | — |
| MRAH.S113C-IgG1 | Single | — |
| G1T4.A118C-IgG1 | Single | — |
| G1T4.S119C-IgG1 | Double | 18.4 |
| G1T4.T120C-IgG1 | Single | — |
| G1T4.K121C-IgG1 | Single | — |
| G1T4.G122C-IgG1 | Single | — |
| G1T4.P123C-IgG1 | LMW | — |
| G1T4.S124C-IgG1 | Single | — |
| G1T4.V125C-IgG1 | LMW | — |
| G1T4.F126C-IgG1 | Single | — |
| G1T4.P127C-IgG1 | LMW | — |
| G1T4.S131C-IgG1 | Triple | — |
| G1T4.S132C-IgG1 | Triple | — |
| G1T4.K133C-IgG1 | Triple | — |
| G1T4.S134C-IgG1 | Triple | — |
| G1T4.T135C-IgG1 | Triple | — |
| G1T4.S136C-IgG1 | Triple | — |
| G1T4.G137C-IgG1 | Triple | — |
| G1T4.G138C-IgG1 | Double | 56.7 |
| G1T4.T139C-IgG1 | Single | — |
| G1T4.A140C-IgG1 | Single | — |
| G1T4.A141C-IgG1 | Faint | — |
| G1T4.D148C-IgG1 | Single | — |
| G1T4.Y149C-IgG1 | Faint | — |
| G1T4.F150C-IgG1 | Single | — |
| G1T4.P151C-IgG1 | Faint | — |
| G1T4.E152C-IgG1 | Single | — |
| G1T4.P153C-IgG1 | Single | — |
| G1T4.V154C-IgG1 | LMW | — |
| G1T4.T155C-IgG1 | Single | — |
| G1T4.V156C-IgG1 | LMW | — |
| G1T4.S157C-IgG1 | Single | — |
| G1T4.W158C-IgG1 | LMW | — |
| G1T4.N159C-IgG1 | Double | 24 |
| G1T4.S160C-IgG1 | Double | 35.7 |
| G1T4.G161C-IgG1 | Double | 27.2 |
| G1T4.A162C-IgG1 | Double | 27.8 |
| G1T4.L163C-IgG1 | Double | 16.7 |
| G1T4.T164C-IgG1 | Double | 13.8 |
| G1T4.S165C-IgG1 | Single | — |
| G1T4.G166C-IgG1 | Single | — |
| G1T4.V167C-IgG1 | Single | — |
| G1T4.V173C-IgG1 | Single | — |
| G1T4.L174C-IgG1 | Single | — |
| G1T4.Q175C-IgG1 | Single | — |
| G1T4.S176C-IgG1 | Single | — |
| G1T4.S177C-IgG1 | Single | — |
| G1T4.G178C-IgG1 | Single | — |
| G1T4.L179C-IgG1 | Single | — |
| G1T4.Y180C-IgG1 | LMW | — |
| G1T4.V186C-IgG1 | LMW | — |
| G1T4.T187C-IgG1 | Single | — |
| G1T4.V188C-IgG1 | LMW | — |
| G1T4.P189C-IgG1 | no data | — |
| G1T4.S190C-IgG1 | Double | 31.8 |
| G1T4.S191C-IgG1 | Double | 66.3 |
| G1T4.S192C-IgG1 | Double | 26.8 |
| G1T4.L193C-IgG1 | LMW | — |
| G1T4.G194C-IgG1 | Faint | — |
| G1T4.T195C-IgG1 | Double | 78.1 |
| G1T4.Q196C-IgG1 | Double | 27.4 |
| G1T4.T197C-IgG1 | Double | 84.4 |
| G1T4.Y198C-IgG1 | Faint | — |
| G1T4.I199C-IgG1 | Single | — |
| G1T4.N201C-IgG1 | Double | 17.5 |
| G1T4.V202C-IgG1 | LMW | — |
| G1T4.N203C-IgG1 | Double | 17.2 |
| G1T4.H204C-IgG1 | Faint | — |
| G1T4.K205C-IgG1 | Double | 18.4 |
| G1T4.P206C-IgG1 | Double | 14.4 |
| G1T4.S207C-IgG1 | Double | 21.5 |
| G1T4.N208C-IgG1 | Double | 16.1 |
| G1T4.T209C-IgG1 | Single | — |
| G1T4.K210C-IgG1 | Single | — |
| G1T4.V211C-IgG1 | Double | 27.2 |
| G1T4.D212C-IgG1 | Double | 28.2 |
| G1T4.K213C-IgG1 | LMW | — |
| G1T4.R214C-IgG1 | LMW | — |
| G1T4.V215C-IgG1 | LMW | — |
| G1T4.E216C-IgG1 | LMW | — |
| G1T4.P217C-IgG1 | LMW | — |
| G1T4.K218C-IgG1 | Double | 39.3 |
| G1T4.S219C-IgG1 | Double | 68.7 |

TABLE 35

| MRA-IgG1 light chain | | Percentage of new |
|---|---|---|
| variant name | Group | band (%) |
| MRAL.T5C-IgG1 | Single | — |
| MRAL.Q6C-IgG1 | LMW | — |
| MRAL.S7C-IgG1 | Single | — |
| MRAL.P8C-IgG1 | no data | — |
| MRAL.S9C-IgG1 | Single | — |
| MRAL.S10C-IgG1 | Single | — |
| MRAL.L11C-IgG1 | Single | — |
| MRAL.S12C-IgG1 | Single | — |
| MRAL.A13C-IgG1 | Single | — |
| MRAL.S14C-IgG1 | Single | — |
| MRAL.V15C-IgG1 | Single | — |
| MRAL.G16C-IgG1 | Single | — |
| MRAL.D17C-IgG1 | Single | — |
| MRAL.R18C-IgG1 | Single | — |
| MRAL.V19C-IgG1 | LMW | — |
| MRAL.T20C-IgG1 | Single | — |
| MRAL.I21C-IgG1 | Double | 68.9 |
| MRAL.T22C-IgG1 | Single | — |
| MRAL.A25C-IgG1 | no data | — |
| MRAL.S26C-IgG1 | no data | — |
| MRAL.Q27C-IgG1 | Triple | — |
| MRAL.Y32C-IgG1 | Single | — |
| MRAL.L33C-IgG1 | LMW | — |
| MRAL.N34C-IgG1 | LMW | — |
| MRAL.Y50C-IgG1 | Single | — |
| MRAL.T51C-IgG1 | Single | — |
| MRAL.H55C-IgG1 | Single | — |
| MRAL.S56C-IgG1 | Single | — |
| MRAL.G57C-IgG1 | Single | — |
| MRAL.V58C-IgG1 | Double | 17.4 |
| MRAL.P59C-IgG1 | Single | — |
| MRAL.S60C-IgG1 | Single | — |
| MRAL.R61C-IgG1 | Single | — |
| MRAL.F62C-IgG1 | LMW | — |
| MRAL.S63C-IgG1 | Single | — |
| MRAL.S65C-IgG1 | Single | — |
| MRAL.S67C-IgG1 | Single | — |
| MRAL.G68C-IgG1 | Single | — |
| MRAL.T69C-IgG1 | Single | — |
| MRAL.D70C-IgG1 | Single | — |
| MRAL.T72C-IgG1 | Single | — |
| MRAL.F73C-IgG1 | LMW | — |
| MRAL.T74C-IgG1 | Single | — |
| MRAL.I75C-IgG1 | no data | — |
| MRAL.S76C-IgG1 | Single | — |
| MRAL.S77C-IgG1 | Double | 18.1 |
| MRAL.L78C-IgG1 | LMW | — |
| MRAL.Q79C-IgG1 | Single | — |
| MRAL.Y96C-IgG1 | LMW | — |
| MRAL.T97C-IgG1 | Single | — |
| MRAL.F98C-IgG1 | LMW | — |
| MRAL.G99C-IgG1 | no data | — |
| MRAL.Q100C-IgG1 | Single | — |
| MRAL.G101C-IgG1 | Single | — |
| MRAL.T102C-IgG1 | LMW | — |
| MRAL.K103C-IgG1 | Single | — |
| MRAL.V104C-IgG1 | LMW | — |
| MRAL.E105C-IgG1 | no data | — |
| MRAL.I106C-IgG1 | Single | — |
| MRAL.K107C-IgG1 | no data | — |
| k0.R108C-IgG1 | Single | — |
| k0.T109C-IgG1 | Double | 23.1 |
| k0.V110C-IgG1 | Single | — |
| k0.A111C-IgG1 | Single | — |
| k0.A112C-IgG1 | Double | 21.6 |
| k0.P113C-IgG1 | Single | — |
| k0.S114C-IgG1 | Single | — |
| k0.V115C-IgG1 | LMW | — |
| k0.F116C-IgG1 | Single | — |
| k0.P120C-IgG1 | LMW | — |
| k0.S121C-IgG1 | Several | — |
| k0.D122C-IgG1 | LMW | — |
| k0.E123C-IgG1 | Double | 18.1 |
| k0.Q124C-IgG1 | LMW | — |
| k0.L125C-IgG1 | LMW | — |
| k0.K126C-IgG1 | Triple | — |
| k0.S127C-IgG1 | Single | — |
| k0.G128C-IgG1 | Double | 19.4 |
| k0.T129C-IgG1 | Single | — |
| k0.A130C-IgG1 | LMW | — |
| k0.S131C-IgG1 | LMW | — |
| k0.L136C-IgG1 | LMW | — |
| k0.N137C-IgG1 | LMW | — |
| k0.N138C-IgG1 | Single | — |
| k0.F139C-IgG1 | LMW | — |
| k0.Y140C-IgG1 | LMW | — |
| k0.P141C-IgG1 | Single | — |
| k0.R142C-IgG1 | Single | — |
| k0.E143C-IgG1 | Single | — |
| k0.A144C-IgG1 | LMW | — |
| k0.K145C-IgG1 | Single | — |
| k0.V146C-IgG1 | LMW | — |
| k0.Q147C-IgG1 | Single | — |
| k0.W148C-IgG1 | LMW | — |
| k0.K149C-IgG1 | Single | — |
| k0.V150C-IgG1 | LMW | — |
| k0.D151C-IgG1 | Single | — |
| k0.N152C-IgG1 | Double | 62.4 |
| k0.A153C-IgG1 | Single | — |
| k0.L154C-IgG1 | Single | — |
| k0.Q155C-IgG1 | Single | — |
| k0.S156C-IgG1 | HMW | — |
| k0.G157C-IgG1 | Single | — |
| k0.N158C-IgG1 | Single | — |
| k0.S159C-IgG1 | Single | — |
| k0.Q160C-IgG1 | Single | — |
| k0.E161C-IgG1 | Single | — |
| k0.S162C-IgG1 | Single | — |
| k0.V163C-IgG1 | Single | — |
| k0.T164C-IgG1 | Single | — |
| k0.E165C-IgG1 | Single | — |
| k0.Q166C-IgG1 | Single | — |
| k0.D167C-IgG1 | Single | — |
| k0.S168C-IgG1 | Single | — |
| k0.K169C-IgG1 | Single | — |
| k0.D170C-IgG1 | Single | — |
| k0.S171C-IgG1 | Single | — |
| k0.T172C-IgG1 | LMW | — |
| k0.Y173C-IgG1 | LMW | — |
| k0.S174C-IgG1 | Single | — |
| k0.L175C-IgG1 | LMW | — |
| k0.T180C-IgG1 | Single | — |
| k0.L181C-IgG1 | Single | — |
| k0.S182C-IgG1 | Single | — |
| k0.K183C-IgG1 | Single | — |
| k0.A184C-IgG1 | Single | — |
| k0.D185C-IgG1 | Single | — |
| k0.Y186C-IgG1 | Double | 26.3 |
| k0.E187C-IgG1 | LMW | — |
| k0.K188C-IgG1 | Single | — |
| k0.H189C-IgG1 | Triple | — |
| k0.K190C-IgG1 | LMW | — |
| k0.V191C-IgG1 | LMW | — |
| k0.Y192C-IgG1 | Single | — |
| k0.A193C-IgG1 | Single | — |
| k0.E195C-IgG1 | Single | — |
| k0.V196C-IgG1 | Single | — |
| k0.T197C-IgG1 | Single | — |
| k0.H198C-IgG1 | Faint | — |
| k0.Q199C-IgG1 | Single | — |
| k0.G200C-IgG1 | Double | 18.7 |
| k0.L201C-IgG1 | Single | — |
| k0.S202C-IgG1 | Double | 42.3 |
| k0.S203C-IgG1 | Double | 45.5 |
| k0.P204C-IgG1 | Single | — |
| k0.V205C-IgG1 | Single | — |
| k0.T206C-IgG1 | Single | — |
| k0.K207C-IgG1 | Single | — |
| k0.S208C-IgG1 | Single | — |
| k0.F209C-IgG1 | LMW | — |
| k0.N210C-IgG1 | LMW | — |
| k0.R211C-IgG1 | Single | — |
| k0.G212C-IgG1 | Double | 68.5 |
| k0.E213C-IgG1 | LMW | — |

TABLE 36

| MRA-IgG1 variant | | Percentage of new |
|---|---|---|
| name | Group | band (%) |
| MRAH.E6C-IgG1 | Double | 30.7 |
| MRAH.S25C-IgG1 | Double | 20.2 |
| MRAH.G26C-IgG1 | Double | 14.5 |
| G1T4.S119C-IgG1 | Double | 18.4 |
| G1T4.S131C-IgG1 | Triple | — |
| G1T4.S132C-IgG1 | Triple | — |
| G1T4.K133C-IgG1 | Triple | — |
| G1T4.S134C-IgG1 | Triple | — |
| G1T4.T135C-IgG1 | Triple | — |
| G1T4.S136C-IgG1 | Triple | — |
| G1T4.G137C-IgG1 | Triple | — |
| G1T4.G138C-IgG1 | Double | 56.7 |
| G1T4.N159C-IgG1 | Double | 24 |
| G1T4.S160C-IgG1 | Double | 35.7 |
| G1T4.G161C-IgG1 | Double | 27.2 |
| G1T4.A162C-IgG1 | Double | 27.8 |
| G1T4.L163C-IgG1 | Double | 16.7 |
| G1T4.T164C-IgG1 | Double | 13.8 |
| G1T4.S190C-IgG1 | Double | 31.8 |
| G1T4.S191C-IgG1 | Double | 66.3 |
| G1T4.S192C-IgG1 | Double | 26.8 |
| G1T4.T195C-IgG1 | Double | 78.1 |
| G1T4.Q196C-IgG1 | Double | 27.4 |
| G1T4.T197C-IgG1 | Double | 84.4 |
| G1T4.N201C-IgG1 | Double | 17.5 |
| G1T4.N203C-IgG1 | Double | 17.2 |
| G1T4.K205C-IgG1 | Double | 18.4 |
| G1T4.P206C-IgG1 | Double | 14.4 |
| G1T4.S207C-IgG1 | Double | 21.5 |
| G1T4.N208C-IgG1 | Double | 16.1 |
| G1T4.V211C-IgG1 | Double | 27.2 |
| G1T4.D212C-IgG1 | Double | 28.2 |
| G1T4.K218C-IgG1 | Double | 39.3 |
| G1T4.S219C-IgG1 | Double | 68.7 |
| MRAL.I21C-IgG1 | Double | 68.9 |
| MRAL.Q27C-IgG1 | Triple | — |
| MRAL.V58C-IgG1 | Double | 17.4 |
| MRAL.S77C-IgG1 | Double | 18.1 |
| k0.T109C-IgG1 | Double | 23.1 |
| k0.A112C-IgG1 | Double | 21.6 |
| k0.E123C-IgG1 | Double | 18.1 |
| k0.K126C-IgG1 | Triple | — |
| k0.G128C-IgG1 | Double | 19.4 |
| k0.N152C-IgG1 | Double | 62.4 |
| k0.Y186C-IgG1 | Double | 26.3 |
| k0.H189C-IgG1 | Triple | — |
| k0.G200C-IgG1 | Double | 18.7 |
| k0.S202C-IgG1 | Double | 42.3 |
| k0.S203C-IgG1 | Double | 45.5 |
| k0.G212C-IgG1 | Double | 68.5 |

### Reference Example 9 Assessment of Antibodies Having Cysteine Substitution at Various Positions of IgG4

### Reference Example 9-1 Production of Antibodies Having Cysteine Substitution at Various Positions of IgG4

[1006] The heavy chain and light chain of an anti-human IL6R neutralizing antibody, MRA-IgG4 (heavy chain: MRAH-G4T1 (SEQ ID NO: 310), light chain: MRAL-k0 (SEQ ID NO: 16)), were subjected to a study in which an arbitrary amino acid residue structurally exposed to the surface was substituted with cysteine.

[1007] Amino acid residues within the MRA-IgG4 heavy chain variable region (MRAH, SEQ ID NO: 17) were substituted with cysteine to produce variants of the MRA-IgG4 heavy chain variable region shown in Table 37. These variants of the MRA-IgG4 heavy chain variable region were each linked with the MRA-IgG4 heavy chain constant region (G4T1, SEQ ID NO: 311) to produce MRA-IgG4 heavy chain variants, and expression vectors encoding the corresponding genes were produced by a method known to the person skilled in the art. In addition, amino acid residues within the MRA-IgG4 heavy chain constant region (G4T1, SEQ ID NO: 311) were substituted with cysteine to produce variants of the MRA-IgG4 heavy chain constant region shown in Table 38. These variants of the MRA-IgG4 heavy chain constant region were each linked with the MRA-IgG4 heavy chain variable region (MRAH, SEQ ID NO: 17) to produce MRA-IgG4 heavy chain variants, and expression vectors encoding the corresponding genes were produced by a method known to the person skilled in the art.

TABLE 37

| Variant of MRA-IgG4 | Position of cysteine | |
|---|---|---|
| heavy chain variable | substitution | |
| region | (Rabat numbering) | SEQ ID NO: |
| MRAH.Q5C | 5 | 322 |
| MRAH.E6C | 6 | 323 |
| MRAH.S7C | 7 | 324 |
| MRAH.G8C | 8 | 325 |
| MRAH.P9C | 9 | 326 |
| MRAH.G10C | 10 | 327 |
| MRAH.L11C | 11 | 328 |
| MRAH.V12C | 12 | 329 |
| MRAH.R13C | 13 | 330 |
| MRAH.P14C | 14 | 331 |
| MRAH.S15C | 15 | 332 |
| MRAH.Q16C | 16 | 333 |
| MRAH.T17C | 17 | 334 |
| MRAH.L18C | 18 | 335 |
| MRAH.S19C | 19 | 336 |
| MRAH.L20C | 20 | 337 |
| MRAH.T21C | 21 | 338 |
| MRAH.T23C | 23 | 339 |
| MRAH.S25C | 25 | 340 |
| MRAH.G26C | 26 | 341 |
| MRAH.S28C | 28 | 342 |
| MRAH.T30C | 30 | 343 |
| MRAH.S31C | 31 | 344 |
| MRAH.W35C | 35 | 345 |
| MRAH.S35aC | 35a | 346 |
| MRAH.Y50C | 50 | 347 |
| MRAH.I51C | 51 | 348 |
| MRAH.S52C | 52 | 349 |
| MRAH.S62C | 62 | 350 |
| MRAH.L63C | 63 | 351 |
| MRAH.K64C | 64 | 352 |
| MRAH.S65C | 65 | 353 |
| MRAH.R66C | 66 | 354 |
| MRAH.V67C | 67 | 355 |
| MRAH.T68C | 68 | 356 |
| MRAH.L70C | 70 | 357 |
| MRAH.D72C | 72 | 358 |
| MRAH.T73C | 73 | 359 |
| MRAH.S74C | 74 | 360 |
| MRAH.K75C | 75 | 361 |
| MRAH.N76C | 76 | 362 |
| MRAH.Q77C | 77 | 363 |
| MRAH.S79C | 79 | 364 |
| MRAH.L80C | 80 | 365 |
| MRAH.R81C | 81 | 366 |
| MRAH.L82C | 82 | 367 |
| MRAH.S82aC | 82a | 368 |
| MRAH.S82bC | 82b | 369 |
| MRAH.V82cC | 82c | 370 |
| MRAH.D101C | 101 | 371 |
| MRAH.Y102C | 102 | 372 |
| MRAH.S112C | 112 | 373 |
| MRAH.S113C | 113 | 374 |

TABLE 38

| Variant of MRA-IgG4 | Position of cysteine | |
|---|---|---|
| heavy chain constant | substitution | |
| region | (EU numbering) | SEQ ID NO: |
| G4T1.A118C | 118 | 611 |
| G4T1.S119C | 119 | 612 |
| G4T1.T120C | 120 | 613 |
| G4T1.K121C | 121 | 614 |
| G4T1.G122C | 122 | 615 |
| G4T1.P123C | 123 | 616 |
| G4T1.S124C | 124 | 617 |
| G4T1.V125C | 125 | 618 |
| G4T1.F126C | 126 | 619 |
| G4T1.P127C | 127 | 620 |
| G4T1.S132C | 132 | 621 |
| G4T1.R133C | 133 | 622 |
| G4T1.S134C | 134 | 623 |
| G4T1.T135C | 135 | 624 |
| G4T1.S136C | 136 | 625 |
| G4T1.E137C | 137 | 626 |
| G4T1.S138C | 138 | 627 |
| G4T1.T139C | 139 | 628 |
| G4T1.A140C | 140 | 629 |
| G4T1.A141C | 141 | 630 |
| G4T1.D148C | 148 | 631 |
| G4T1.Y149C | 149 | 632 |
| G4T1.F150C | 150 | 633 |
| G4T1.P151C | 151 | 634 |
| G4T1.E152C | 152 | 635 |
| G4T1.P153C | 153 | 636 |
| G4T1.V154C | 154 | 637 |
| G4T1.T155C | 155 | 638 |
| G4T1.V156C | 156 | 639 |
| G4T1.S157C | 157 | 640 |
| G4T1.W158C | 158 | 641 |
| G4T1.N159C | 159 | 642 |
| G4T1.S160C | 160 | 643 |
| G4T1.G161C | 161 | 644 |
| G4T1.A162C | 162 | 645 |
| G4T1.L163C | 163 | 646 |
| G4T1.T164C | 164 | 647 |
| G4T1.S165C | 165 | 648 |
| G4T1.G166C | 166 | 649 |
| G4T1.V167C | 167 | 650 |
| G4T1.V173C | 173 | 651 |
| G4T1.L174C | 174 | 652 |
| G4T1.Q175C | 175 | 653 |
| G4T1.S176C | 176 | 654 |
| G4T1.S177C | 177 | 655 |
| G4T1.G178C | 178 | 656 |
| G4T1.L179C | 179 | 657 |
| G4T1.Y180C | 180 | 658 |
| G4T1.V186C | 186 | 659 |
| G4T1.T187C | 187 | 660 |
| G4T1.V188C | 188 | 661 |
| G4T1.P189C | 189 | 662 |
| G4T1.S190C | 190 | 663 |
| G4T1.S191C | 191 | 664 |
| G4T1.S192C | 192 | 665 |
| G4T1.L193C | 193 | 666 |
| G4T1.G194C | 194 | 667 |
| G4T1.T195C | 195 | 668 |
| G4T1.Q196C | 196 | 669 |
| G4T1.T197C | 197 | 670 |
| G4T1.Y198C | 198 | 671 |
| G4T1.T199C | 199 | 672 |
| G4T1.N201C | 201 | 673 |
| G4T1.V202C | 202 | 674 |
| G4T1.D203C | 203 | 675 |
| G4T1.H204C | 204 | 676 |
| G4T1.K205C | 205 | 677 |
| G4T1.P206C | 206 | 678 |
| G4T1.S207C | 207 | 679 |
| G4T1.N208C | 208 | 680 |
| G4T1.T209C | 209 | 681 |
| G4T1.K210C | 210 | 682 |
| G4T1.V211C | 211 | 683 |
| G4T1.D212C | 212 | 684 |
| G4T1.K213C | 213 | 685 |
| G4T1.R214C | 214 | 686 |
| G4T1.V215C | 215 | 687 |
| G4T1.E216C | 216 | 688 |
| G4T1.S217C | 217 | 689 |
| G4T1.K218C | 218 | 690 |

[1008] The MRA-IgG4 heavy chain variants produced above were combined with the MRA-IgG4 light chain, or the MRA-IgG4 heavy chain was combined with the MRA-IgG4 light chain variants produced in Reference Example 8-1. The resultant MRA-IgG4 heavy chain variants and MRA-IgG4 light chain variants shown in Tables 39 and 40 were expressed by transient expression using FreeStyle293 cells (Invitrogen) or Expi293 cells (Life technologies) by a method known to the person skilled in the art, and purified with Protein A by a method known to the person skilled in the art.

TABLE 39

| | Heavy | Heavy | Light | Light |
|---|---|---|---|---|
| | chain | chain | chain | chain |
| | variable | constant | variable | constant |
| | region | region | region | region |
| MRA-IgG4 heavy chain | SEQ ID | SEQ ID | SEQ ID | SEQ ID |
| variant name | NO: | NO: | NO: | NO: |
| MRAH.Q5C-IgG4 | 322 | 311 | 19 | 20 |
| MRAH.E6C-IgG4 | 323 | 311 | 19 | 20 |
| MRAH.S7C-IgG4 | 324 | 311 | 19 | 20 |
| MRAH.G8C-IgG4 | 325 | 311 | 19 | 20 |
| MRAH.P9C-IgG4 | 326 | 311 | 19 | 20 |
| MRAH.G10C-IgG4 | 327 | 311 | 19 | 20 |
| MRAH.L11C-IgG4 | 328 | 311 | 19 | 20 |
| MRAH.V12C-IgG4 | 329 | 311 | 19 | 20 |
| MRAH.R13C-IgG4 | 330 | 311 | 19 | 20 |
| MRAH.P14C-IgG4 | 331 | 311 | 19 | 20 |
| MRAH.S15C-IgG4 | 332 | 311 | 19 | 20 |
| MRAH.Q16C-IgG4 | 333 | 311 | 19 | 20 |
| MRAH.T17C-IgG4 | 334 | 311 | 19 | 20 |
| MRAH.L18C-IgG4 | 335 | 311 | 19 | 20 |
| MRAH.S19C-IgG4 | 336 | 311 | 19 | 20 |
| MRAH.L20C-IgG4 | 337 | 311 | 19 | 20 |
| MRAH.T21C-IgG4 | 338 | 311 | 19 | 20 |
| MRAH.T23C-IgG4 | 339 | 311 | 19 | 20 |
| MRAH.S25C-IgG4 | 340 | 311 | 19 | 20 |
| MRAH.G26C-IgG4 | 341 | 311 | 19 | 20 |
| MRAH.S28C-IgG4 | 342 | 311 | 19 | 20 |
| MRAH.T30C-IgG4 | 343 | 311 | 19 | 20 |
| MRAH.S31C-IgG4 | 344 | 311 | 19 | 20 |
| MRAH.W35C-IgG4 | 345 | 311 | 19 | 20 |
| MRAH.S35aC-IgG4 | 346 | 311 | 19 | 20 |
| MRAH.Y50C-IgG4 | 347 | 311 | 19 | 20 |
| MRAH.I51C-IgG4 | 348 | 311 | 19 | 20 |
| MRAH.S52C-IgG4 | 349 | 311 | 19 | 20 |
| MRAH.S62C-IgG4 | 350 | 311 | 19 | 20 |
| MRAH.L63C-IgG4 | 351 | 311 | 19 | 20 |
| MRAH.K64C-IgG4 | 352 | 311 | 19 | 20 |
| MRAH.S65C-IgG4 | 353 | 311 | 19 | 20 |
| MRAH.R66C-IgG4 | 354 | 311 | 19 | 20 |
| MRAH.V67C-IgG4 | 355 | 311 | 19 | 20 |
| MRAH.T68C-IgG4 | 356 | 311 | 19 | 20 |
| MRAH.L70C-IgG4 | 357 | 311 | 19 | 20 |
| MRAH.D72C-IgG4 | 358 | 311 | 19 | 20 |
| MRAH.T73C-IgG4 | 359 | 311 | 19 | 20 |
| MRAH.S74C-IgG4 | 360 | 311 | 19 | 20 |
| MRAH.K75C-IgG4 | 361 | 311 | 19 | 20 |
| MRAH.N76C-IgG4 | 362 | 311 | 19 | 20 |
| MRAH.Q77C-IgG4 | 363 | 311 | 19 | 20 |
| MRAH.S79C-IgG4 | 364 | 311 | 19 | 20 |
| MRAH.L80C-IgG4 | 365 | 311 | 19 | 20 |
| MRAH.R81C-IgG4 | 366 | 311 | 19 | 20 |
| MRAH.L82C-IgG4 | 367 | 311 | 19 | 20 |
| MRAH.S82aC-IgG4 | 368 | 311 | 19 | 20 |
| MRAH.S82bC-IgG4 | 369 | 311 | 19 | 20 |
| MRAH.V82cC-IgG4 | 370 | 311 | 19 | 20 |
| MRAH.D101C-IgG4 | 371 | 311 | 19 | 20 |
| MRAH.Y102C-IgG4 | 372 | 311 | 19 | 20 |
| MRAH.S112C-IgG4 | 373 | 311 | 19 | 20 |
| MRAH.S113C-IgG4 | 374 | 311 | 19 | 20 |
| G4T1.A118C-IgG4 | 17 | 611 | 19 | 20 |
| G4T1.S119C-IgG4 | 17 | 612 | 19 | 20 |
| G4T1.T120C-IgG4 | 17 | 613 | 19 | 20 |
| G4T1.K121C-IgG4 | 17 | 614 | 19 | 20 |
| G4T1.G122C-IgG4 | 17 | 615 | 19 | 20 |
| G4T1.P123C-IgG4 | 17 | 616 | 19 | 20 |
| G4T1.S124C-IgG4 | 17 | 617 | 19 | 20 |
| G4T1.V125C-IgG4 | 17 | 618 | 19 | 20 |
| G4T1.F126C-IgG4 | 17 | 619 | 19 | 20 |
| G4T1.P127C-IgG4 | 17 | 620 | 19 | 20 |
| G4T1.S132C-IgG4 | 17 | 621 | 19 | 20 |
| G4T1.R133C-IgG4 | 17 | 622 | 19 | 20 |
| G4T1.S134C-IgG4 | 17 | 623 | 19 | 20 |
| G4T1.T135C-IgG4 | 17 | 624 | 19 | 20 |
| G4T1.S136C-IgG4 | 17 | 625 | 19 | 20 |
| G4T1.E137C-IgG4 | 17 | 626 | 19 | 20 |
| G4T1.S138C-IgG4 | 17 | 627 | 19 | 20 |
| G4T1.T139C-IgG4 | 17 | 628 | 19 | 20 |
| G4T1.A140C-IgG4 | 17 | 629 | 19 | 20 |
| G4T1.A141C-IgG4 | 17 | 630 | 19 | 20 |
| G4T1.D148C-IgG4 | 17 | 631 | 19 | 20 |
| G4T1.Y149C-IgG4 | 17 | 632 | 19 | 20 |
| G4T1.F150C-IgG4 | 17 | 633 | 19 | 20 |
| G4T1.P151C-IgG4 | 17 | 634 | 19 | 20 |
| G4T1.E152C-IgG4 | 17 | 635 | 19 | 20 |
| G4T1.P153C-IgG4 | 17 | 636 | 19 | 20 |
| G4T1.V154C-IgG4 | 17 | 637 | 19 | 20 |
| G4T1.T155C-IgG4 | 17 | 638 | 19 | 20 |
| G4T1.V156C-IgG4 | 17 | 639 | 19 | 20 |
| G4T1.S157C-IgG4 | 17 | 640 | 19 | 20 |
| G4T1.W158C-IgG4 | 17 | 641 | 19 | 20 |
| G4T1.N159C-IgG4 | 17 | 642 | 19 | 20 |
| G4T1.S160C-IgG4 | 17 | 643 | 19 | 20 |
| G4T1.G161C-IgG4 | 17 | 644 | 19 | 20 |
| G4T1.A162C-IgG4 | 17 | 645 | 19 | 20 |
| G4T1.L163C-IgG4 | 17 | 646 | 19 | 20 |
| G4T1.T164C-IgG4 | 17 | 647 | 19 | 20 |
| G4T1.S165C-IgG4 | 17 | 648 | 19 | 20 |
| G4T1.G166C-IgG4 | 17 | 649 | 19 | 20 |
| G4T1.V167C-IgG4 | 17 | 650 | 19 | 20 |
| G4T1.V173C-IgG4 | 17 | 651 | 19 | 20 |
| G4T1.L174C-IgG4 | 17 | 652 | 19 | 20 |
| G4T1.Q175C-IgG4 | 17 | 653 | 19 | 20 |
| G4T1.S176C-IgG4 | 17 | 654 | 19 | 20 |
| G4T1.S177C-IgG4 | 17 | 655 | 19 | 20 |
| G4T1.G178C-IgG4 | 17 | 656 | 19 | 20 |
| G4T1.L179C-IgG4 | 17 | 657 | 19 | 20 |
| G4T1.Y180C-IgG4 | 17 | 658 | 19 | 20 |
| G4T1.V186C-IgG4 | 17 | 659 | 19 | 20 |
| G4T1.T187C-IgG4 | 17 | 660 | 19 | 20 |
| G4T1.V188C-IgG4 | 17 | 661 | 19 | 20 |
| G4T1.P189C-IgG4 | 17 | 662 | 19 | 20 |
| G4T1.S190C-IgG4 | 17 | 663 | 19 | 20 |
| G4T1.S191C-IgG4 | 17 | 664 | 19 | 20 |
| G4T1.S192C-IgG4 | 17 | 665 | 19 | 20 |
| G4T1.L193C-IgG4 | 17 | 666 | 19 | 20 |
| G4T1.G194C-IgG4 | 17 | 667 | 19 | 20 |
| G4T1.T195C-IgG4 | 17 | 668 | 19 | 20 |
| G4T1.Q196C-IgG4 | 17 | 669 | 19 | 20 |
| G4T1.T197C-IgG4 | 17 | 670 | 19 | 20 |
| G4T1.Y198C-IgG4 | 17 | 671 | 19 | 20 |
| G4T1.T199C-IgG4 | 17 | 672 | 19 | 20 |
| G4T1.N201C-IgG4 | 17 | 673 | 19 | 20 |
| G4T1.V202C-IgG4 | 17 | 674 | 19 | 20 |
| G4T1.D203C-IgG4 | 17 | 675 | 19 | 20 |
| G4T1.H204C-IgG4 | 17 | 676 | 19 | 20 |
| G4T1.K205C-IgG4 | 17 | 677 | 19 | 20 |
| G4T1.P206C-IgG4 | 17 | 678 | 19 | 20 |
| G4T1.S207C-IgG4 | 17 | 679 | 19 | 20 |
| G4T1.N208C-IgG4 | 17 | 680 | 19 | 20 |
| G4T1.T209C-IgG4 | 17 | 681 | 19 | 20 |
| G4T1.K210C-IgG4 | 17 | 682 | 19 | 20 |
| G4T1.V211C-IgG4 | 17 | 683 | 19 | 20 |
| G4T1.D212C-IgG4 | 17 | 684 | 19 | 20 |
| G4T1.K213C-IgG4 | 17 | 685 | 19 | 20 |
| G4T1.R214C-IgG4 | 17 | 686 | 19 | 20 |
| G4T1.V215C-IgG4 | 17 | 687 | 19 | 20 |
| G4T1.E216C-IgG4 | 17 | 688 | 19 | 20 |
| G4T1.S217C-IgG4 | 17 | 689 | 19 | 20 |
| G4T1.K218C-IgG4 | 17 | 690 | 19 | 20 |

TABLE 40

| | Heavy | Heavy | Light | Light |
|---|---|---|---|---|
| | chain | chain | chain | chain |
| | variable | constant | variable | constant |
| | region | region | region | region |
| MRA-IgG4 light chain | SEQ ID | SEQ ID | SEQ ID | SEQ ID |
| variant name | NO: | NO: | NO: | NO: |
| MRAL.T5C-IgG4 | 17 | 311 | 457 | 20 |
| MRAL.Q6C-IgG4 | 17 | 311 | 458 | 20 |
| MRAL.S7C-IgG4 | 17 | 311 | 459 | 20 |
| MRAL.P8C-IgG4 | 17 | 311 | 460 | 20 |
| MRAL.S9C-IgG4 | 17 | 311 | 461 | 20 |
| MRAL.S10C-IgG4 | 17 | 311 | 462 | 20 |
| MRAL.L11C-IgG4 | 17 | 311 | 463 | 20 |
| MRAL.S12C-IgG4 | 17 | 311 | 464 | 20 |
| MRAL.A13C-IgG4 | 17 | 311 | 465 | 20 |
| MRAL.S14C-IgG4 | 17 | 311 | 466 | 20 |
| MRAL.V15C-IgG4 | 17 | 311 | 467 | 20 |
| MRAL.G16C-IgG4 | 17 | 311 | 468 | 20 |
| MRAL.D17C-IgG4 | 17 | 311 | 469 | 20 |
| MRAL.R18C-IgG4 | 17 | 311 | 470 | 20 |
| MRAL.V19C-IgG4 | 17 | 311 | 471 | 20 |
| MRAL.T20C-IgG4 | 17 | 311 | 472 | 20 |
| MRAL.I21C-IgG4 | 17 | 311 | 473 | 20 |
| MRAL.T22C-IgG4 | 17 | 311 | 474 | 20 |
| MRAL.A25C-IgG4 | 17 | 311 | 475 | 20 |
| MRAL.S26C-IgG4 | 17 | 311 | 476 | 20 |
| MRAL.Q27C-IgG4 | 17 | 311 | 477 | 20 |
| MRAL.Y32C-IgG4 | 17 | 311 | 478 | 20 |
| MRAL.L33C-IgG4 | 17 | 311 | 479 | 20 |
| MRAL.N34C-IgG4 | 17 | 311 | 480 | 20 |
| MRAL.Y50C-IgG4 | 17 | 311 | 481 | 20 |
| MRAL.T51C-IgG4 | 17 | 311 | 482 | 20 |
| MRAL.H55C-IgG4 | 17 | 311 | 483 | 20 |
| MRAL.S56C-IgG4 | 17 | 311 | 484 | 20 |
| MRAL.G57C-IgG4 | 17 | 311 | 485 | 20 |
| MRAL.V58C-IgG4 | 17 | 311 | 486 | 20 |
| MRAL.P59C-IgG4 | 17 | 311 | 487 | 20 |
| MRAL.S60C-IgG4 | 17 | 311 | 488 | 20 |
| MRAL.R61C-IgG4 | 17 | 311 | 489 | 20 |
| MRAL.F62C-IgG4 | 17 | 311 | 490 | 20 |
| MRAL.S63C-IgG4 | 17 | 311 | 491 | 20 |
| MRAL.S65C-IgG4 | 17 | 311 | 492 | 20 |
| MRAL.S67C-IgG4 | 17 | 311 | 493 | 20 |
| MRAL.G68C-IgG4 | 17 | 311 | 494 | 20 |
| MRAL.T69C-IgG4 | 17 | 311 | 495 | 20 |
| MRAL.D70C-IgG4 | 17 | 311 | 496 | 20 |
| MRAL.T72C-IgG4 | 17 | 311 | 497 | 20 |
| MRAL.F73C-IgG4 | 17 | 311 | 498 | 20 |
| MRAL.T74C-IgG4 | 17 | 311 | 499 | 20 |
| MRAL.I75C-IgG4 | 17 | 311 | 500 | 20 |
| MRAL.S76C-IgG4 | 17 | 311 | 501 | 20 |
| MRAL.S77C-IgG4 | 17 | 311 | 502 | 20 |
| MRAL.L78C-IgG4 | 17 | 311 | 503 | 20 |
| MRAL.Q79C-IgG4 | 17 | 311 | 504 | 20 |
| MRAL.Y96C-IgG4 | 17 | 311 | 505 | 20 |
| MRAL.T97C-IgG4 | 17 | 311 | 506 | 20 |
| MRAL.F98C-IgG4 | 17 | 311 | 507 | 20 |
| MRAL.G99C-IgG4 | 17 | 311 | 508 | 20 |
| MRAL.Q100C-IgG4 | 17 | 311 | 509 | 20 |
| MRAL.G101C-IgG4 | 17 | 311 | 510 | 20 |
| MRAL.T102C-IgG4 | 17 | 311 | 511 | 20 |
| MRAL.K103C-IgG4 | 17 | 311 | 512 | 20 |
| MRAL.V104C-IgG4 | 17 | 311 | 513 | 20 |
| MRAL.E105C-IgG4 | 17 | 311 | 514 | 20 |
| MRAL.I106C-IgG4 | 17 | 311 | 515 | 20 |
| MRAL.K107C-IgG4 | 17 | 311 | 516 | 20 |
| k0.R108C-IgG4 | 17 | 311 | 19 | 517 |
| k0.T109C-IgG4 | 17 | 311 | 19 | 518 |
| k0.V110C-IgG4 | 17 | 311 | 19 | 519 |
| k0.A111C-IgG4 | 17 | 311 | 19 | 520 |
| k0.A112C-IgG4 | 17 | 311 | 19 | 521 |
| k0.P113C-IgG4 | 17 | 311 | 19 | 522 |
| k0.S114C-IgG4 | 17 | 311 | 19 | 523 |
| k0.V115C-IgG4 | 17 | 311 | 19 | 524 |
| k0.F116C-IgG4 | 17 | 311 | 19 | 525 |
| k0.P120C-IgG4 | 17 | 311 | 19 | 526 |
| k0.S121C-IgG4 | 17 | 311 | 19 | 527 |
| k0.D122C-IgG4 | 17 | 311 | 19 | 528 |
| k0.E123C-IgG4 | 17 | 311 | 19 | 529 |
| k0.Q124C-IgG4 | 17 | 311 | 19 | 530 |
| k0.L125C-IgG4 | 17 | 311 | 19 | 531 |
| k0.K126C-IgG4 | 17 | 311 | 19 | 532 |
| k0.S127C-IgG4 | 17 | 311 | 19 | 533 |
| k0.G128C-IgG4 | 17 | 311 | 19 | 534 |
| k0.T129C-IgG4 | 17 | 311 | 19 | 535 |
| k0.A130C-IgG4 | 17 | 311 | 19 | 536 |
| k0.S131C-IgG4 | 17 | 311 | 19 | 537 |
| k0.L136C-IgG4 | 17 | 311 | 19 | 538 |
| k0.N137C-IgG4 | 17 | 311 | 19 | 539 |
| k0.N138C-IgG4 | 17 | 311 | 19 | 540 |
| k0.F139C-IgG4 | 17 | 311 | 19 | 541 |
| k0.Y140C-IgG4 | 17 | 311 | 19 | 542 |
| k0.P141C-IgG4 | 17 | 311 | 19 | 543 |
| k0.R142C-IgG4 | 17 | 311 | 19 | 544 |
| k0.E143C-IgG4 | 17 | 311 | 19 | 545 |
| k0.A144C-IgG4 | 17 | 311 | 19 | 546 |
| k0.K145C-IgG4 | 17 | 311 | 19 | 547 |
| k0.V146C-IgG4 | 17 | 311 | 19 | 548 |
| k0.Q147C-IgG4 | 17 | 311 | 19 | 549 |
| k0.W148C-IgG4 | 17 | 311 | 19 | 550 |
| k0.K149C-IgG4 | 17 | 311 | 19 | 551 |
| k0.V150C-IgG4 | 17 | 311 | 19 | 552 |
| k0.D151C-IgG4 | 17 | 311 | 19 | 553 |
| k0.N152C-IgG4 | 17 | 311 | 19 | 554 |
| k0.A153C-IgG4 | 17 | 311 | 19 | 555 |
| k0.L154C-IgG4 | 17 | 311 | 19 | 556 |
| k0.Q155C-IgG4 | 17 | 311 | 19 | 557 |
| k0.S156C-IgG4 | 17 | 311 | 19 | 558 |
| k0.G157C-IgG4 | 17 | 311 | 19 | 559 |
| k0.N158C-IgG4 | 17 | 311 | 19 | 560 |
| k0.S159C-IgG4 | 17 | 311 | 19 | 561 |
| k0.Q160C-IgG4 | 17 | 311 | 19 | 562 |
| k0.E161C-IgG4 | 17 | 311 | 19 | 563 |
| k0.S162C-IgG4 | 17 | 311 | 19 | 564 |
| k0.V163C-IgG4 | 17 | 311 | 19 | 565 |
| k0.T164C-IgG4 | 17 | 311 | 19 | 566 |
| k0.E165C-IgG4 | 17 | 311 | 19 | 567 |
| k0.Q166C-IgG4 | 17 | 311 | 19 | 568 |
| k0.D167C-IgG4 | 17 | 311 | 19 | 569 |
| k0.S168C-IgG4 | 17 | 311 | 19 | 570 |
| k0.K169C-IgG4 | 17 | 311 | 19 | 571 |
| k0.D170C-IgG4 | 17 | 311 | 19 | 572 |
| k0.S171C-IgG4 | 17 | 311 | 19 | 573 |
| k0.T172C-IgG4 | 17 | 311 | 19 | 574 |
| k0.Y173C-IgG4 | 17 | 311 | 19 | 575 |
| k0.S174C-IgG4 | 17 | 311 | 19 | 576 |
| k0.L175C-IgG4 | 17 | 311 | 19 | 577 |
| k0.T180C-IgG4 | 17 | 311 | 19 | 578 |
| k0.L181C-IgG4 | 17 | 311 | 19 | 579 |
| k0.S182C-IgG4 | 17 | 311 | 19 | 580 |
| k0.K183C-IgG4 | 17 | 311 | 19 | 581 |
| k0.A184C-IgG4 | 17 | 311 | 19 | 582 |
| k0.D185C-IgG4 | 17 | 311 | 19 | 583 |
| k0.Y186C-IgG4 | 17 | 311 | 19 | 584 |
| k0.E187C-IgG4 | 17 | 311 | 19 | 585 |
| k0.K188C-IgG4 | 17 | 311 | 19 | 586 |
| k0.H189C-IgG4 | 17 | 311 | 19 | 587 |
| k0.K190C-IgG4 | 17 | 311 | 19 | 588 |
| k0.V191C-IgG4 | 17 | 311 | 19 | 589 |
| k0.Y192C-IgG4 | 17 | 311 | 19 | 590 |
| k0.A193C-IgG4 | 17 | 311 | 19 | 591 |
| k0.E195C-IgG4 | 17 | 311 | 19 | 592 |
| k0.V196C-IgG4 | 17 | 311 | 19 | 593 |
| k0.T197C-IgG4 | 17 | 311 | 19 | 594 |
| k0.H198C-IgG4 | 17 | 311 | 19 | 595 |
| k0.Q199C-IgG4 | 17 | 311 | 19 | 596 |
| k0.G200C-IgG4 | 17 | 311 | 19 | 597 |
| k0.L201C-IgG4 | 17 | 311 | 19 | 598 |
| k0.S202C-IgG4 | 17 | 311 | 19 | 599 |
| k0.S203C-IgG4 | 17 | 311 | 19 | 600 |
| k0.P204C-IgG4 | 17 | 311 | 19 | 601 |
| k0.V205C-IgG4 | 17 | 311 | 19 | 602 |
| k0.T206C-IgG4 | 17 | 311 | 19 | 603 |
| k0.K207C-IgG4 | 17 | 311 | 19 | 604 |
| k0.S208C-IgG4 | 17 | 311 | 19 | 605 |
| k0.F209C-IgG4 | 17 | 311 | 19 | 606 |
| k0.N210C-IgG4 | 17 | 311 | 19 | 607 |
| k0.R211C-IgG4 | 17 | 311 | 19 | 608 |
| k0.G212C-IgG4 | 17 | 311 | 19 | 609 |
| k0.E213C-IgG4 | 17 | 311 | 19 | 610 |

### Reference Example 9-2 Assessment of Electrophoretic Mobility in Polyacrylamide Gel of Antibodies Having Cysteine Substitution at Various Positions of IgG4

[1009] Similarly to Reference Example 8-2, non-reducing SDS-PAGE was carried out with the MRA-IgG4 variants produced in Reference Example 9-1, the gel image was captured, and bands were quantified.

[1010] From the obtained gel image, the variants were classified into 7 groups according to the band pattern of each of the MRA-IgG4 variants: Single (one band at a molecular weight region similar to that of MRA-IgG4), Double (two bands at a molecular weight region similar to that of MRA-IgG4), Triple (three bands at a molecular weight region similar to that of MRA-IgG4), Several (four or more bands at a molecular weight region similar to that of MRA-IgG4), LMW (band(s) at a molecular weight region lower than that of MRA-IgG4), HMW (band(s) at a molecular weight region higher than that of MRA-IgG4), and Faint (band(s) blurry and difficult to determine). Regarding the MRA-IgG4 variants classified as “Double”, one of the two bands showed the same electrophoretic mobility as MRA-IgG4 while the other band showed slightly faster or slower mobility. Thus, for the MRA-IgG4 variants classified as “Double”, the percentage of the bands showing different mobility to MRA-IgG4 (percentage of new band (%)) was also calculated. Grouping of the band patterns for MRA-IgG4 heavy chain variants and MRA-IgG4 light chain variants, and the calculation results of the band percentage are respectively shown in Tables 41 and 42. From Tables 41 and 42, variants classified into the Double and Triple groups are shown in Table 43. In these variants, it is highly likely that cysteine substitution caused structural changes such as crosslinkage of Fabs, which resulted in the change in electrophoretic mobility. It is noted that while Table 26 indicates “no data” for MRAL.K107C-IgG4, position 107 (Kabat numbering), which is the position of cysteine substitution in this variant, is a position where the residue structurally exposed to the surface is present in the hinge region. Thus, in this variant also, it is highly likely that cysteine substitution causes structural changes such as crosslinkage of Fabs, and results in the change in electrophoretic mobility.

TABLE 41

| MRA-IgG4 heavy chain | | Percentage of new |
|---|---|---|
| variant name | Group | band (%) |
| MRAH.Q5C-IgG4 | Single | — |
| MRAH.E6C-IgG4 | Double | 5.8 |
| MRAH.S7C-IgG4 | Single | — |
| MRAH.G8C-IgG4 | Single | — |
| MRAH.P9C-IgG4 | Single | — |
| MRAH.G10C-IgG4 | Single | — |
| MRAH.L11C-IgG4 | Single | — |
| MRAH.V12C-IgG4 | Faint | — |
| MRAH.R13C-IgG4 | Single | — |
| MRAH.P14C-IgG4 | Single | — |
| MRAH.S15C-IgG4 | Single | — |
| MRAH.Q16C-IgG4 | Single | — |
| MRAH.T17C-IgG4 | Single | — |
| MRAH.L18C-IgG4 | LMW | — |
| MRAH.S19C-IgG4 | Single | — |
| MRAH.L20C-IgG4 | LMW | — |
| MRAH.T21C-IgG4 | Single | — |
| MRAH.T23C-IgG4 | Single | — |
| MRAH.S25C-IgG4 | Double | 62.1 |
| MRAH.G26C-IgG4 | Double | 9.4 |
| MRAH.S28C-IgG4 | Single | — |
| MRAH.T30C-IgG4 | Single | — |
| MRAH.S31C-IgG4 | Single | — |
| MRAH.W35C-IgG4 | LMW | — |
| MRAH.S35aC-IgG4 | LMW | — |
| MRAH.Y50C-IgG4 | Single | — |
| MRAH.I51C-IgG4 | LMW | — |
| MRAH.S52C-IgG4 | Single | — |
| MRAH.S62C-IgG4 | Single | — |
| MRAH.L63C-IgG4 | Single | — |
| MRAH.K64C-IgG4 | Single | — |
| MRAH.S65C-IgG4 | Single | — |
| MRAH.R66C-IgG4 | Single | — |
| MRAH.V67C-IgG4 | LMW | — |
| MRAH.T68C-IgG4 | Single | — |
| MRAH.L70C-IgG4 | Single | — |
| MRAH.D72C-IgG4 | Single | — |
| MRAH.T73C-IgG4 | Single | — |
| MRAH.S74C-IgG4 | Double | 5.3 |
| MRAH.K75C-IgG4 | Single | — |
| MRAH.N76C-IgG4 | Single | — |
| MRAH.Q77C-IgG4 | Single | — |
| MRAH.S79C-IgG4 | Single | — |
| MRAH.L80C-IgG4 | LMW | — |
| MRAH.R81C-IgG4 | Single | — |
| MRAH.L82C-IgG4 | LMW | — |
| MRAH.S82aC-IgG4 | Single | — |
| MRAH.S82bC-IgG4 | Single | — |
| MRAH.V82cC-IgG4 | LMW | — |
| MRAH.D101C-IgG4 | Single | — |
| MRAH.Y102C-IgG4 | Single | — |
| MRAH.S112C-IgG4 | Single | — |
| MRAH.S113C-IgG4 | Single | — |
| G4T1.A118C-IgG4 | Single | — |
| G4T1.S119C-IgG4 | Double | 11 |
| G4T1.T120C-IgG4 | Single | — |
| G4T1.K121C-IgG4 | Single | — |
| G4T1.G122C-IgG4 | Single | — |
| G4T1.P123C-IgG4 | LMW | — |
| G4T1.S124C-IgG4 | Single | — |
| G4T1.V125C-IgG4 | LMW | — |
| G4T1.F126C-IgG4 | LMW | — |
| G4T1.P127C-IgG4 | LMW | — |
| G4T1.S132C-IgG4 | Triple | — |
| G4T1.R133C-IgG4 | Double | 82.9 |
| G4T1.S134C-IgG4 | Double | 80.4 |
| G4T1.T135C-IgG4 | Double | 88.6 |
| G4T1.S136C-IgG4 | Double | 82.4 |
| G4T1.E137C-IgG4 | Double | 44.7 |
| G4T1.S138C-IgG4 | Double | 52.6 |
| G4T1.T139C-IgG4 | Single | — |
| G4T1.A140C-IgG4 | Triple | — |
| G4T1.A141C-IgG4 | Single | — |
| G4T1.D148C-IgG4 | Single | — |
| G4T1.Y149C-IgG4 | Faint | — |
| G4T1.F150C-IgG4 | Single | — |
| G4T1.P151C-IgG4 | LMW | — |
| G4T1.E152C-IgG4 | Single | — |
| G4T1.P153C-IgG4 | Single | — |
| G4T1.V154C-IgG4 | LMW | — |
| G4T1.T155C-IgG4 | Single | — |
| G4T1.V156C-IgG4 | LMW | — |
| G4T1.S157C-IgG4 | Single | — |
| G4T1.W158C-IgG4 | LMW | — |
| G4T1.N159C-IgG4 | Double | 19.9 |
| G4T1.S160C-IgG4 | Double | 29.5 |
| G4T1.G161C-IgG4 | Double | 21.4 |
| G4T1.A162C-IgG4 | Double | 35.6 |
| G4T1.L163C-IgG4 | Double | 21.1 |
| G4T1.T164C-IgG4 | Double | 12.8 |
| G4T1.S165C-IgG4 | Double | 17 |
| G4T1.G166C-IgG4 | Double | 13 |
| G4T1.V167C-IgG4 | Double | 20.4 |
| G4T1.V173C-IgG4 | Double | 15.6 |
| G4T1.L174C-IgG4 | Double | 18.6 |
| G4T1.Q175C-IgG4 | Single | — |
| G4T1.S176C-IgG4 | Double | 20.3 |
| G4T1.S177C-IgG4 | Single | — |
| G4T1.G178C-IgG4 | Double | 22.5 |
| G4T1.L179C-IgG4 | Double | 26.1 |
| G4T1.Y180C-IgG4 | LMW | — |
| G4T1.V186C-IgG4 | LMW | — |
| G4T1.T187C-IgG4 | Double | 23.3 |
| G4T1.V188C-IgG4 | Double | 25.5 |
| G4T1.P189C-IgG4 | Double | 30.4 |
| G4T1.S190C-IgG4 | Double | 54.7 |
| G4T1.S191C-IgG4 | Double | 78.3 |
| G4T1.S192C-IgG4 | Double | 46.9 |
| G4T1.L193C-IgG4 | Double | 89.5 |
| G4T1.G194C-IgG4 | Double | 89.2 |
| G4T1.T195C-IgG4 | Double | 90.3 |
| G4T1.Q196C-IgG4 | Double | 63.4 |
| G4T1.T197C-IgG4 | Double | 79.8 |
| G4T1.Y198C-IgG4 | LMW | — |
| G4T1.T199C-IgG4 | LMW | — |
| G4T1.N201C-IgG4 | LMW | — |
| G4T1.V202C-IgG4 | LMW | — |
| G4T1.D203C-IgG4 | LMW | — |
| G4T1.H204C-IgG4 | LMW | — |
| G4T1.K205C-IgG4 | LMW | — |
| G4T1.P206C-IgG4 | LMW | — |
| G4T1.S207C-IgG4 | LMW | — |
| G4T1.N208C-IgG4 | LMW | — |
| G4T1.T209C-IgG4 | LMW | — |
| G4T1.K210C-IgG4 | Single | — |
| G4T1.V211C-IgG4 | Single | — |
| G4T1.D212C-IgG4 | Single | — |
| G4T1.K213C-IgG4 | Triple | — |
| G4T1.R214C-IgG4 | Single | — |
| G4T1.V215C-IgG4 | Double | 57.3 |
| G4T1.E216C-IgG4 | Single | — |
| G4T1.S217C-IgG4 | Single | — |
| G4T1.K218C-IgG4 | Single | — |

TABLE 42

| MRA-IgG4 light chain | | Percentage of new |
|---|---|---|
| variant name | Group | band (%) |
| MRAL.T5C-IgG4 | HMW | — |
| MRAL.Q6C-IgG4 | Faint | — |
| MRAL.S7C-IgG4 | Single | — |
| MRAL.P8C-IgG4 | no data | — |
| MRAL.S9C-IgG4 | Single | — |
| MRAL.S10C-IgG4 | Single | — |
| MRAL.L11C-IgG4 | Single | — |
| MRAL.S12C-IgG4 | Single | — |
| MRAL.A13C-IgG4 | Single | — |
| MRAL.S14C-IgG4 | Single | — |
| MRAL.V15C-IgG4 | Single | — |
| MRAL.G16C-IgG4 | Single | — |
| MRAL.D17C-IgG4 | Single | — |
| MRAL.R18C-IgG4 | Single | — |
| MRAL.V19C-IgG4 | Double | 29.2 |
| MRAL.T20C-IgG4 | Single | — |
| MRAL.I21C-IgG4 | Faint | — |
| MRAL.T22C-IgG4 | Single | — |
| MRAL.A25C-IgG4 | Faint | — |
| MRAL.S26C-IgG4 | Single | — |
| MRAL.Q27C-IgG4 | Single | — |
| MRAL.Y32C-IgG4 | Single | — |
| MRAL.L33C-IgG4 | Faint | — |
| MRAL.N34C-IgG4 | Faint | — |
| MRAL.Y50C-IgG4 | Single | — |
| MRAL.T51C-IgG4 | Single | — |
| MRAL.H55C-IgG4 | Single | — |
| MRAL.S56C-IgG4 | Double | 12.2 |
| MRAL.G57C-IgG4 | Double | 13.5 |
| MRAL.V58C-IgG4 | Double | 12.3 |
| MRAL.P59C-IgG4 | Double | 3.4 |
| MRAL.S60C-IgG4 | Double | 17.9 |
| MRAL.R61C-IgG4 | Single | — |
| MRAL.F62C-IgG4 | Double | 39.1 |
| MRAL.S63C-IgG4 | Single | — |
| MRAL.S65C-IgG4 | Single | — |
| MRAL.S67C-IgG4 | Single | — |
| MRAL.G68C-IgG4 | Single | — |
| MRAL.T69C-IgG4 | Single | — |
| MRAL.D70C-IgG4 | Single | — |
| MRAL.T72C-IgG4 | Single | — |
| MRAL.F73C-IgG4 | Double | 36.9 |
| MRAL.T74C-IgG4 | Single | — |
| MRAL.175C-IgG4 | no data | — |
| MRAL.S76C-IgG4 | Single | — |
| MRAL.S77C-IgG4 | Double | 51.2 |
| MRAL.L78C-IgG4 | Faint | — |
| MRAL.Q79C-IgG4 | Single | — |
| MRAL.Y96C-IgG4 | Faint | — |
| MRAL.T97C-IgG4 | Single | — |
| MRAL.F98C-IgG4 | Faint | — |
| MRAL.G99C-IgG4 | Double | 26.7 |
| MRAL.Q100C-IgG4 | Single | — |
| MRAL.G101C-IgG4 | Single | — |
| MRAL.T102C-IgG4 | Faint | — |
| MRAL.K103C-IgG4 | Single | — |
| MRAL.V104C-IgG4 | Faint | — |
| MRAL.E105C-IgG4 | Single | — |
| MRAL.I106C-IgG4 | Faint | — |
| MRAL.K107C-IgG4 | no data | — |
| k0.R108C-IgG4 | Single | — |
| k0.T109C-IgG4 | Double | 14.5 |
| k0.V110C-IgG4 | Double | 13.2 |
| k0.A111C-IgG4 | Single | — |
| k0.A112C-IgG4 | Double | 12 |
| k0.P113C-IgG4 | Single | — |
| k0.S114C-IgG4 | Single | — |
| k0.V115C-IgG4 | Faint | — |
| k0.F116C-IgG4 | Triple | — |
| k0.P120C-IgG4 | Faint | — |
| k0.S121C-IgG4 | Single | — |
| k0.D122C-IgG4 | LMW | — |
| k0.E123C-IgG4 | Single | — |
| k0.Q124C-IgG4 | Faint | — |
| k0.L125C-IgG4 | Single | — |
| k0.K126C-IgG4 | Double | 86.3 |
| k0.S127C-IgG4 | Single | — |
| k0.G128C-IgG4 | Single | — |
| k0.T129C-IgG4 | Single | — |
| k0.A130C-IgG4 | Faint | — |
| k0.S131C-IgG4 | LMW | — |
| k0.L136C-IgG4 | LMW | — |
| k0.N137C-IgG4 | Triple | — |
| k0.N138C-IgG4 | Single | — |
| k0.F139C-IgG4 | LMW | — |
| k0.Y140C-IgG4 | LMW | — |
| k0.P141C-IgG4 | Single | — |
| k0.R142C-IgG4 | Single | — |
| k0.E143C-IgG4 | Single | — |
| k0.A144C-IgG4 | LMW | — |
| k0.K145C-IgG4 | Single | — |
| k0.V146C-IgG4 | LMW | — |
| k0.Q147C-IgG4 | Single | — |
| k0.W148C-IgG4 | LMW | — |
| k0.K149C-IgG4 | Single | — |
| k0.V150C-IgG4 | LMW | — |
| k0.D151C-IgG4 | Double | 21.9 |
| k0.N152C-IgG4 | Double | 68.7 |
| k0.A153C-IgG4 | Single | — |
| k0.L154C-IgG4 | Single | — |
| k0.Q155C-IgG4 | Single | — |
| k0.S156C-IgG4 | HMW | — |
| k0.G157C-IgG4 | Single | — |
| k0.N158C-IgG4 | Single | — |
| k0.S159C-IgG4 | Single | — |
| k0.Q160C-IgG4 | Single | — |
| k0.E161C-IgG4 | Single | — |
| k0.S162C-IgG4 | Single | — |
| k0.V163C-IgG4 | Single | — |
| k0.T164C-IgG4 | Single | — |
| k0.E165C-IgG4 | Single | — |
| k0.Q166C-IgG4 | Single | — |
| k0.D167C-IgG4 | Single | — |
| k0.S168C-IgG4 | Single | — |
| k0.K169C-IgG4 | Single | — |
| k0.D170C-IgG4 | Single | — |
| k0.S171C-IgG4 | Single | — |
| k0.T172C-IgG4 | Faint | — |
| k0.Y173C-IgG4 | Faint | — |
| k0.S174C-IgG4 | Faint | — |
| k0.L175C-IgG4 | Faint | — |
| k0.T180C-IgG4 | Single | — |
| k0.L181C-IgG4 | Faint | — |
| k0.S182C-IgG4 | Single | — |
| k0.K183C-IgG4 | Single | — |
| k0.A184C-IgG4 | Double | 11.8 |
| k0.D185C-IgG4 | Single | — |
| k0.Y186C-IgG4 | Double | 31.7 |
| k0.E187C-IgG4 | LMW | — |
| k0.K188C-IgG4 | Single | — |
| k0.H189C-IgG4 | Faint | — |
| k0.K190C-IgG4 | LMW | — |
| k0.V191C-IgG4 | LMW | — |
| k0.Y192C-IgG4 | Faint | — |
| k0.A193C-IgG4 | Single | — |
| k0.E195C-IgG4 | Single | — |
| k0.V196C-IgG4 | Faint | — |
| k0.T197C-IgG4 | Single | — |
| k0.H198C-IgG4 | Faint | — |
| k0.Q199C-IgG4 | Single | — |
| k0.G200C-IgG4 | Double | 21.7 |
| k0.L201C-IgG4 | Double | 3.7 |
| k0.S202C-IgG4 | Double | 61.5 |
| k0.S203C-IgG4 | Double | 39 |
| k0.P204C-IgG4 | Single | — |
| k0.V205C-IgG4 | Single | — |
| k0.T206C-IgG4 | Single | — |
| k0.K207C-IgG4 | Single | — |
| k0.S208C-IgG4 | Single | — |
| k0.F209C-IgG4 | Double | 82.2 |
| k0.N210C-IgG4 | LMW | — |
| k0.R211C-IgG4 | Double | 12.1 |
| k0.G212C-IgG4 | Double | 25.6 |
| k0.E213C-IgG4 | Double | 90.9 |

TABLE 43

| MRA-IgG4 variant | | Percentage of new |
|---|---|---|
| name | Group | band (%) |
| MRAH.E6C-IgG4 | Double | 5.8 |
| MRAH.S25C-IgG4 | Double | 62.1 |
| MRAH.G26C-IgG4 | Double | 9.4 |
| MRAH.S74C-IgG4 | Double | 5.3 |
| G4T1.S119C-IgG4 | Double | 11 |
| G4T1.S132C-IgG4 | Triple | — |
| G4T1.R133C-IgG4 | Double | 82.9 |
| G4T1.S134C-IgG4 | Double | 80.4 |
| G4T1.T135C-IgG4 | Double | 88.6 |
| G4T1.S136C-IgG4 | Double | 82.4 |
| G4T1.E137C-IgG4 | Double | 44.7 |
| G4T1.S138C-IgG4 | Double | 52.6 |
| G4T1.A140C-IgG4 | Triple | — |
| G4T1.N159C-IgG4 | Double | 19.9 |
| G4T1.S160C-IgG4 | Double | 29.5 |
| G4T1.G161C-IgG4 | Double | 21.4 |
| G4T1.A162C-IgG4 | Double | 35.6 |
| G4T1.L163C-IgG4 | Double | 21.1 |
| G4T1.T164C-IgG4 | Double | 12.8 |
| G4T1.S165C-IgG4 | Double | 17 |
| G4T1.G166C-IgG4 | Double | 13 |
| G4T1.V167C-IgG4 | Double | 20.4 |
| G4T1.V173C-IgG4 | Double | 15.6 |
| G4T1.L174C-IgG4 | Double | 18.6 |
| G4T1.S176C-IgG4 | Double | 20.3 |
| G4T1.G178C-IgG4 | Double | 22.5 |
| G4T1.L179C-IgG4 | Double | 26.1 |
| G4T1.T187C-IgG4 | Double | 23.3 |
| G4T1.V188C-IgG4 | Double | 25.5 |
| G4T1.P189C-IgG4 | Double | 30.4 |
| G4T1.S190C-IgG4 | Double | 54.7 |
| G4T1.S191C-IgG4 | Double | 78.3 |
| G4T1.S192C-IgG4 | Double | 46.9 |
| G4T1.L193C-IgG4 | Double | 89.5 |
| G4T1.G194C-IgG4 | Double | 89.2 |
| G4T1.T195C-IgG4 | Double | 90.3 |
| G4T1.Q196C-IgG4 | Double | 63.4 |
| G4T1.T197C-IgG4 | Double | 79.8 |
| G4T1.K213C-IgG4 | Triple | — |
| G4T1.V215C-IgG4 | Double | 57.3 |
| MRAL.V19C-IgG4 | Double | 29.2 |
| MRAL.S56C-IgG4 | Double | 12.2 |
| MRAL.G57C-IgG4 | Double | 13.5 |
| MRAL.V58C-IgG4 | Double | 12.3 |
| MRAL.P59C-IgG4 | Double | 3.4 |
| MRAL.S60C-IgG4 | Double | 17.9 |
| MRAL.F62C-IgG4 | Double | 39.1 |
| MRAL.F73C-IgG4 | Double | 36.9 |
| MRAL.S77C-IgG4 | Double | 51.2 |
| MRAL.G99C-IgG4 | Double | 26.7 |
| k0.T109C-IgG4 | Double | 14.5 |
| k0.V110C-IgG4 | Double | 13.2 |
| k0.A112C-IgG4 | Double | 12 |
| k0.F116C-IgG4 | Triple | — |
| k0.K126C-IgG4 | Double | 86.3 |
| k0.N137C-IgG4 | Triple | — |
| k0.D151C-IgG4 | Double | 21.9 |
| k0.N152C-IgG4 | Double | 68.7 |
| k0.A184C-IgG4 | Double | 11.8 |
| k0.Y186C-IgG4 | Double | 31.7 |
| k0.G200C-IgG4 | Double | 21.7 |
| k0.L201C-IgG4 | Double | 3.7 |
| k0.S202C-IgG4 | Double | 61.5 |
| k0.S203C-IgG4 | Double | 39 |
| k0.F209C-IgG4 | Double | 82.2 |
| k0.R211C-IgG4 | Double | 12.1 |
| k0.G212C-IgG4 | Double | 25.6 |
| k0.E213C-IgG4 | Double | 90.9 |

### Reference Example 10 Assessment of Antibodies Having Cysteine Substitution at Various Positions of IgG2

### Reference Example 10-1 Production of Antibodies Having Cysteine Substitution at Various Positions of IgG2

[1011] The heavy chain and light chain of an anti-human IL6R neutralizing antibody, MRA-IgG2 (heavy chain: MRAH-G2d (SEQ ID NO: 312), light chain: MRAL-k0 (SEQ ID NO: 16)), were subjected to a study in which an arbitrary amino acid residue structurally exposed to the surface was substituted with cysteine.

[1012] Amino acid residues within the MRA-IgG2 heavy chain variable region (MRAH, SEQ ID NO: 17) were substituted with cysteine to produce variants of the MRA-IgG2 heavy chain variable region shown in Table 44. These variants of the MRA-IgG2 heavy chain variable region were each linked with the MRA-IgG2 heavy chain constant region (G2d, SEQ ID NO: 313) to produce MRA-IgG2 heavy chain variants, and expression vectors encoding the corresponding genes were produced by a method known to the person skilled in the art. In addition, amino acid residues within the MRA-IgG2 heavy chain constant region (G2d, SEQ ID NO: 313) were substituted with cysteine to produce variants of the MRA-IgG2 heavy chain constant region shown in Table 45. These variants of the MRA-IgG2 heavy chain constant region were each linked with the MRA-IgG2 heavy chain variable region (MRAH, SEQ ID NO: 17) to produce MRA-IgG2 heavy chain variants, and expression vectors encoding the corresponding genes were produced by a method known to the person skilled in the art.

TABLE 44

| Variant of MRA-IgG2 | Position of cysteine | |
|---|---|---|
| heavy chain variable | substitution | SEQ ID |
| region | (Kabat numbering) | NO: |
| MRAH.Q5C | 5 | 322 |
| MRAH.E6C | 6 | 323 |
| MRAH.S7C | 7 | 324 |
| MRAH.G8C | 8 | 325 |
| MRAH.P9C | 9 | 326 |
| MRAH.G10C | 10 | 327 |
| MRAH.L11C | 11 | 328 |
| MRAH.V12C | 12 | 329 |
| MRAH.R13C | 13 | 330 |
| MRAH.P14C | 14 | 331 |
| MRAH.S15C | 15 | 332 |
| MRAH.Q16C | 16 | 333 |
| MRAH.T17C | 17 | 334 |
| MRAH.L18C | 18 | 335 |
| MRAH.S19C | 19 | 336 |
| MRAH.L20C | 20 | 337 |
| MRAH.T21C | 21 | 338 |
| MRAH.T23C | 23 | 339 |
| MRAH.S25C | 25 | 340 |
| MRAH.G26C | 26 | 341 |
| MRAH.S28C | 28 | 342 |
| MRAH.T30C | 30 | 343 |
| MRAH.S31C | 31 | 344 |
| MRAH.W35C | 35 | 345 |
| MRAH.S35aC | 35a | 346 |
| MRAH.Y50C | 50 | 347 |
| MRAH.I51C | 51 | 348 |
| MRAH.S52C | 52 | 349 |
| MRAH.S62C | 62 | 350 |
| MRAH.L63C | 63 | 351 |
| MRAH.K64C | 64 | 352 |
| MRAH.S65C | 65 | 353 |
| MRAH.R66C | 66 | 354 |
| MRAH.V67C | 67 | 355 |
| MRAH.T68C | 68 | 356 |
| MRAH.L70C | 70 | 357 |
| MRAH.D72C | 72 | 358 |
| MRAH.T73C | 73 | 359 |
| MRAH.S74C | 74 | 360 |
| MRAH.K75C | 75 | 361 |
| MRAH.N76C | 76 | 362 |
| MRAH.Q77C | 77 | 363 |
| MRAH.S79C | 79 | 364 |
| MRAH.L80C | 80 | 365 |
| MRAH.R81C | 81 | 366 |
| MRAH.L82C | 82 | 367 |
| MRAH.S82aC | 82a | 368 |
| MRAH.S82bC | 82b | 369 |
| MRAH.V82cC | 82c | 370 |
| MRAH.D101C | 101 | 371 |
| MRAH.Y102C | 102 | 372 |
| MRAH.S112C | 112 | 373 |
| MRAH.S113C | 113 | 374 |

TABLE 45

| Variant of MRA-IgG2 | Position of cysteine | |
|---|---|---|
| heavy chain constant | substitution | SEQ ID |
| region | (EU numbering) | NO: |
| G2d.A118C | 118 | 691 |
| G2d.S119C | 119 | 692 |
| G2d.T120C | 120 | 693 |
| G2d.K121C | 121 | 694 |
| G2d.G122C | 122 | 695 |
| G2d.P123C | 123 | 696 |
| G2d.S124C | 124 | 697 |
| G2d.V125C | 125 | 698 |
| G2d.F126C | 126 | 699 |
| G2d.P127C | 127 | 700 |
| G2d.S132C | 132 | 701 |
| G2d.R133C | 133 | 702 |
| G2d.S134C | 134 | 703 |
| G2d.T135C | 135 | 704 |
| G2d.S136C | 136 | 705 |
| G2d.E137C | 137 | 706 |
| G2d.S138C | 138 | 707 |
| G2d.T139C | 139 | 708 |
| G2d.A140C | 140 | 709 |
| G2d.A141C | 141 | 710 |
| G2d.D148C | 148 | 711 |
| G2d.Y149C | 149 | 712 |
| G2d.F150C | 150 | 713 |
| G2d.P151C | 151 | 714 |
| G2d.E152C | 152 | 715 |
| G2d.P153C | 153 | 716 |
| G2d.V154C | 154 | 717 |
| G2d.T155C | 155 | 718 |
| G2d.V156C | 156 | 719 |
| G2d.S157C | 157 | 720 |
| G2d.W158C | 158 | 721 |
| G2d.N159C | 159 | 722 |
| G2d.S160C | 160 | 723 |
| G2d.G161C | 161 | 724 |
| G2d.A162C | 162 | 725 |
| G2d.L163C | 163 | 726 |
| G2d.T164C | 164 | 727 |
| G2d.S165C | 165 | 728 |
| G2d.G166C | 166 | 729 |
| G2d.V167C | 167 | 730 |
| G2d.V173C | 173 | 731 |
| G2d.L174C | 174 | 732 |
| G2d.Q175C | 175 | 733 |
| G2d.S176C | 176 | 734 |
| G2d.S177C | 177 | 735 |
| G2d.G178C | 178 | 736 |
| G2d.L179C | 179 | 737 |
| G2d.Y180C | 180 | 738 |
| G2d.V186C | 186 | 739 |
| G2d.T187C | 187 | 740 |
| G2d.V188C | 188 | 741 |
| G2d.P189C | 189 | 742 |
| G2d.S190C | 190 | 743 |
| G2d.S191C | 191 | 744 |
| G2d.N192C | 192 | 745 |
| G2d.F193C | 193 | 746 |
| G2d.G194C | 194 | 747 |
| G2d.T195C | 195 | 748 |
| G2d.Q196C | 196 | 749 |
| G2d.T197C | 197 | 750 |
| G2d.Y198C | 198 | 751 |
| G2d.T199C | 199 | 752 |
| G2d.N201C | 201 | 753 |
| G2d.V202C | 202 | 754 |
| G2d.D203C | 203 | 755 |
| G2d.H204C | 204 | 756 |
| G2d.K205C | 205 | 757 |
| G2d.P206C | 206 | 758 |
| G2d.S207C | 207 | 759 |
| G2d.N208C | 208 | 760 |
| G2d.T209C | 209 | 761 |
| G2d.K210C | 210 | 762 |
| G2d.V211C | 211 | 763 |
| G2d.D212C | 212 | 764 |
| G2d.K213C | 213 | 765 |
| G2d.T214C | 214 | 766 |
| G2d.V215C | 215 | 767 |
| G2d.E216C | 216 | 768 |
| G2d.R217C | 217 | 769 |
| G2d.K218C | 218 | 770 |

[1013] The MRA-IgG2 heavy chain variants produced above were combined with the MRA-IgG2 light chain, or the MRA-IgG2 heavy chain was combined with the MRA-IgG2 light chain variants produced in Reference Example 8-1. The resultant MRA-IgG2 heavy chain variants and MRA-IgG2 light chain variants shown in Tables 46 and 47 were expressed by transient expression using FreeStyle293 cells (Invitrogen) or Expi293 cells (Life technologies) by a method known to the person skilled in the art, and purified with Protein A by a method known to the person skilled in the art.

TABLE 46

| | Heavy | Heavy | Light | Light |
|---|---|---|---|---|
| | chain | chain | chain | chain |
| | variable | constant | variable | constant |
| | region | region | region | region |
| MRA-IgG2 heavy chain | SEQ | SEQ | SEQ | SEQ |
| variant name | ID NO: | ID NO: | ID NO: | ID NO: |
| MRAH.Q5C-IgG2 | 322 | 313 | 19 | 20 |
| MRAH.E6C-IgG2 | 323 | 313 | 19 | 20 |
| MRAH.S7C-IgG2 | 324 | 313 | 19 | 20 |
| MRAH.G8C-IgG2 | 325 | 313 | 19 | 20 |
| MRAH.P9C-IgG2 | 326 | 313 | 19 | 20 |
| MRAH.G10C-IgG2 | 327 | 313 | 19 | 20 |
| MRAH.L11C-IgG2 | 328 | 313 | 19 | 20 |
| MRAH.V12C-IgG2 | 329 | 313 | 19 | 20 |
| MRAH.R13C-IgG2 | 330 | 313 | 19 | 20 |
| MRAH.P14C-IgG2 | 331 | 313 | 19 | 20 |
| MRAH.S15C-IgG2 | 332 | 313 | 19 | 20 |
| MRAH.Q16C-IgG2 | 333 | 313 | 19 | 20 |
| MRAH.T17C-IgG2 | 334 | 313 | 19 | 20 |
| MRAH.L18C-IgG2 | 335 | 313 | 19 | 20 |
| MRAH.S19C-IgG2 | 336 | 313 | 19 | 20 |
| MRAH.L20C-IgG2 | 337 | 313 | 19 | 20 |
| MRAH.T21C-IgG2 | 338 | 313 | 19 | 20 |
| MRAH.T23C-IgG2 | 339 | 313 | 19 | 20 |
| MRAH.S25C-IgG2 | 340 | 313 | 19 | 20 |
| MRAH.G26C-IgG2 | 341 | 313 | 19 | 20 |
| MRAH.S28C-IgG2 | 342 | 313 | 19 | 20 |
| MRAH.T30C-IgG2 | 343 | 313 | 19 | 20 |
| MRAH.S31C-IgG2 | 344 | 313 | 19 | 20 |
| MRAH.W35C-IgG2 | 345 | 313 | 19 | 20 |
| MRAH.S35aC-IgG2 | 346 | 313 | 19 | 20 |
| MRAH.Y50C-IgG2 | 347 | 313 | 19 | 20 |
| MRAH.I51C-IgG2 | 348 | 313 | 19 | 20 |
| MRAH.S52C-IgG2 | 349 | 313 | 19 | 20 |
| MRAH.S62C-IgG2 | 350 | 313 | 19 | 20 |
| MRAH.L63C-IgG2 | 351 | 313 | 19 | 20 |
| MRAH.K64C-IgG2 | 352 | 313 | 19 | 20 |
| MRAH.S65C-IgG2 | 353 | 313 | 19 | 20 |
| MRAH.R66C-IgG2 | 354 | 313 | 19 | 20 |
| MRAH.V67C-IgG2 | 355 | 313 | 19 | 20 |
| MRAH.T68C-IgG2 | 356 | 313 | 19 | 20 |
| MRAH.L70C-IgG2 | 357 | 313 | 19 | 20 |
| MRAH.D72C-IgG2 | 358 | 313 | 19 | 20 |
| MRAH.T73C-IgG2 | 359 | 313 | 19 | 20 |
| MRAH.S74C-IgG2 | 360 | 313 | 19 | 20 |
| MRAH.K75C-IgG2 | 361 | 313 | 19 | 20 |
| MRAH.N76C-IgG2 | 362 | 313 | 19 | 20 |
| MRAH.Q77C-IgG2 | 363 | 313 | 19 | 20 |
| MRAH.S79C-IgG2 | 364 | 313 | 19 | 20 |
| MRAH.L80C-IgG2 | 365 | 313 | 19 | 20 |
| MRAH.R81C-IgG2 | 366 | 313 | 19 | 20 |
| MRAH.L82C-IgG2 | 367 | 313 | 19 | 20 |
| MRAH.S82aC-IgG2 | 368 | 313 | 19 | 20 |
| MRAH.S82bC-IgG2 | 369 | 313 | 19 | 20 |
| MRAH.V82cC-IgG2 | 370 | 313 | 19 | 20 |
| MRAH.D101C-IgG2 | 371 | 313 | 19 | 20 |
| MRAH.Y102C-IgG2 | 372 | 313 | 19 | 20 |
| MRAH.S112C-IgG2 | 373 | 313 | 19 | 20 |
| MRAH.S113C-IgG2 | 374 | 313 | 19 | 20 |
| G2d.A118C-IgG2 | 17 | 691 | 19 | 20 |
| G2d.S119C-IgG2 | 17 | 692 | 19 | 20 |
| G2d.T120C-IgG2 | 17 | 693 | 19 | 20 |
| G2d.K121C-IgG2 | 17 | 694 | 19 | 20 |
| G2d.G122C-IgG2 | 17 | 695 | 19 | 20 |
| G2d.P123C-IgG2 | 17 | 696 | 19 | 20 |
| G2d.S124C-IgG2 | 17 | 697 | 19 | 20 |
| G2d.V125C-IgG2 | 17 | 698 | 19 | 20 |
| G2d.F126C-IgG2 | 17 | 699 | 19 | 20 |
| G2d.P127C-IgG2 | 17 | 700 | 19 | 20 |
| G2d.S132C-IgG2 | 17 | 701 | 19 | 20 |
| G2d.R133C-IgG2 | 17 | 702 | 19 | 20 |
| G2d.S134C-IgG2 | 17 | 703 | 19 | 20 |
| G2d.T135C-IgG2 | 17 | 704 | 19 | 20 |
| G2d.S136C-IgG2 | 17 | 705 | 19 | 20 |
| G2d.E137C-IgG2 | 17 | 706 | 19 | 20 |
| G2d.S138C-IgG2 | 17 | 707 | 19 | 20 |
| G2d.T139C-IgG2 | 17 | 708 | 19 | 20 |
| G2d.A140C-IgG2 | 17 | 709 | 19 | 20 |
| G2d.A141C-IgG2 | 17 | 710 | 19 | 20 |
| G2d.D148C-IgG2 | 17 | 711 | 19 | 20 |
| G2d.Y149C-IgG2 | 17 | 712 | 19 | 20 |
| G2d.F150C-IgG2 | 17 | 713 | 19 | 20 |
| G2d.P151C-IgG2 | 17 | 714 | 19 | 20 |
| G2d.E152C-IgG2 | 17 | 715 | 19 | 20 |
| G2d.P153C-IgG2 | 17 | 716 | 19 | 20 |
| G2d.V154C-IgG2 | 17 | 717 | 19 | 20 |
| G2d.T155C-IgG2 | 17 | 718 | 19 | 20 |
| G2d.V156C-IgG2 | 17 | 719 | 19 | 20 |
| G2d.S157C-IgG2 | 17 | 720 | 19 | 20 |
| G2d.W158C-IgG2 | 17 | 721 | 19 | 20 |
| G2d.N159C-IgG2 | 17 | 722 | 19 | 20 |
| G2d.S160C-IgG2 | 17 | 723 | 19 | 20 |
| G2d.G161C-IgG2 | 17 | 724 | 19 | 20 |
| G2d.A162C-IgG2 | 17 | 725 | 19 | 20 |
| G2d.L163C-IgG2 | 17 | 726 | 19 | 20 |
| G2d.T164C-IgG2 | 17 | 727 | 19 | 20 |
| G2d.S165C-IgG2 | 17 | 728 | 19 | 20 |
| G2d.G166C-IgG2 | 17 | 729 | 19 | 20 |
| G2d.V167C-IgG2 | 17 | 730 | 19 | 20 |
| G2d.V173C-IgG2 | 17 | 731 | 19 | 20 |
| G2d.L174C-IgG2 | 17 | 732 | 19 | 20 |
| G2d.Q175C-IgG2 | 17 | 733 | 19 | 20 |
| G2d.S176C-IgG2 | 17 | 734 | 19 | 20 |
| G2d.S177C-IgG2 | 17 | 735 | 19 | 20 |
| G2d.G178C-IgG2 | 17 | 736 | 19 | 20 |
| G2d.L179C-IgG2 | 17 | 737 | 19 | 20 |
| G2d.Y180C-IgG2 | 17 | 738 | 19 | 20 |
| G2d.V186C-IgG2 | 17 | 739 | 19 | 20 |
| G2d.T187C-IgG2 | 17 | 740 | 19 | 20 |
| G2d.V188C-IgG2 | 17 | 741 | 19 | 20 |
| G2d.P189C-IgG2 | 17 | 742 | 19 | 20 |
| G2d.S190C-IgG2 | 17 | 743 | 19 | 20 |
| G2d.S191C-IgG2 | 17 | 744 | 19 | 20 |
| G2d.N192C-IgG2 | 17 | 745 | 19 | 20 |
| G2d.F193C-IgG2 | 17 | 746 | 19 | 20 |
| G2d.G194C-IgG2 | 17 | 747 | 19 | 20 |
| G2d.T195C-IgG2 | 17 | 748 | 19 | 20 |
| G2d.Q196C-IgG2 | 17 | 749 | 19 | 20 |
| G2d.T197C-IgG2 | 17 | 750 | 19 | 20 |
| G2d.Y198C-IgG2 | 17 | 751 | 19 | 20 |
| G2d.T199C-IgG2 | 17 | 752 | 19 | 20 |
| G2d.N201C-IgG2 | 17 | 753 | 19 | 20 |
| G2d.V202C-IgG2 | 17 | 754 | 19 | 20 |
| G2d.D203C-IgG2 | 17 | 755 | 19 | 20 |
| G2d.H204C-IgG2 | 17 | 756 | 19 | 20 |
| G2d.K205C-IgG2 | 17 | 757 | 19 | 20 |
| G2d.P206C-IgG2 | 17 | 758 | 19 | 20 |
| G2d.S207C-IgG2 | 17 | 759 | 19 | 20 |
| G2d.N208C-IgG2 | 17 | 760 | 19 | 20 |
| G2d.T209C-IgG2 | 17 | 761 | 19 | 20 |
| G2d.K210C-IgG2 | 17 | 762 | 19 | 20 |
| G2d.V211C-IgG2 | 17 | 763 | 19 | 20 |
| G2d.D212C-IgG2 | 17 | 764 | 19 | 20 |
| G2d.K213C-IgG2 | 17 | 765 | 19 | 20 |
| G2d.T214C-IgG2 | 17 | 766 | 19 | 20 |
| G2d.V215C-IgG2 | 17 | 767 | 19 | 20 |
| G2d.E216C-IgG2 | 17 | 768 | 19 | 20 |
| G2d.R217C-IgG2 | 17 | 769 | 19 | 20 |
| G2d.K218C-IgG2 | 17 | 770 | 19 | 20 |

TABLE 47

| | Heavy | Heavy | Light | Light |
|---|---|---|---|---|
| | chain | chain | chain | chain |
| | variable | constant | variable | constant |
| | region | region | region | region |
| MRA-IgG2 light chain | SEQ | SEQ | SEQ | SEQ |
| variant name | ID NO: | ID NO: | ID NO: | ID NO: |
| MRAL.T5C-IgG2 | 17 | 313 | 457 | 20 |
| MRAL.Q6C-IgG2 | 17 | 313 | 458 | 20 |
| MRAL.S7C-IgG2 | 17 | 313 | 459 | 20 |
| MRAL.P8C-IgG2 | 17 | 313 | 460 | 20 |
| MRAL.S9C-IgG2 | 17 | 313 | 461 | 20 |
| MRAL.S10C-IgG2 | 17 | 313 | 462 | 20 |
| MRAL.L11C-IgG2 | 17 | 313 | 463 | 20 |
| MRAL.S12C-IgG2 | 17 | 313 | 464 | 20 |
| MRAL.A13C-IgG2 | 17 | 313 | 465 | 20 |
| MRAL.S14C-IgG2 | 17 | 313 | 466 | 20 |
| MRAL.V15C-IgG2 | 17 | 313 | 467 | 20 |
| MRAL.G16C-IgG2 | 17 | 313 | 468 | 20 |
| MRAL.D17C-IgG2 | 17 | 313 | 469 | 20 |
| MRAL.R18C-IgG2 | 17 | 313 | 470 | 20 |
| MRAL.V19C-IgG2 | 17 | 313 | 471 | 20 |
| MRAL.T20C-IgG2 | 17 | 313 | 472 | 20 |
| MRAL.I21C-IgG2 | 17 | 313 | 473 | 20 |
| MRAL.T22C-IgG2 | 17 | 313 | 474 | 20 |
| MRAL.A25C-IgG2 | 17 | 313 | 475 | 20 |
| MRAL.S26C-IgG2 | 17 | 313 | 476 | 20 |
| MRAL.Q27C-IgG2 | 17 | 313 | 477 | 20 |
| MRAL.Y32C-IgG2 | 17 | 313 | 478 | 20 |
| MRAL.L33C-IgG2 | 17 | 313 | 479 | 20 |
| MRAL.N34C-IgG2 | 17 | 313 | 480 | 20 |
| MRAL.Y50C-IgG2 | 17 | 313 | 481 | 20 |
| MRAL.T51C-IgG2 | 17 | 313 | 482 | 20 |
| MRAL.H55C-IgG2 | 17 | 313 | 483 | 20 |
| MRAL.S56C-IgG2 | 17 | 313 | 484 | 20 |
| MRAL.G57C-IgG2 | 17 | 313 | 485 | 20 |
| MRAL.V58C-IgG2 | 17 | 313 | 486 | 20 |
| MRAL.P59C-IgG2 | 17 | 313 | 487 | 20 |
| MRAL.S60C-IgG2 | 17 | 313 | 488 | 20 |
| MRAL.R61C-IgG2 | 17 | 313 | 489 | 20 |
| MRAL.F62C-IgG2 | 17 | 313 | 490 | 20 |
| MRAL.S63C-IgG2 | 17 | 313 | 491 | 20 |
| MRAL.S65C-IgG2 | 17 | 313 | 492 | 20 |
| MRAL.S67C-IgG2 | 17 | 313 | 493 | 20 |
| MRAL.G68C-IgG2 | 17 | 313 | 494 | 20 |
| MRAL.T69C-IgG2 | 17 | 313 | 495 | 20 |
| MRAL.D70C-IgG2 | 17 | 313 | 496 | 20 |
| MRAL.T72C-IgG2 | 17 | 313 | 497 | 20 |
| MRAL.F73C-IgG2 | 17 | 313 | 498 | 20 |
| MRAL.T74C-IgG2 | 17 | 313 | 499 | 20 |
| MRAL.I75C-IgG2 | 17 | 313 | 500 | 20 |
| MRAL.S76C-IgG2 | 17 | 313 | 501 | 20 |
| MRAL.S77C-IgG2 | 17 | 313 | 502 | 20 |
| MRAL.L78C-IgG2 | 17 | 313 | 503 | 20 |
| MRAL.Q79C-IgG2 | 17 | 313 | 504 | 20 |
| MRAL.Y96C-IgG2 | 17 | 313 | 505 | 20 |
| MRAL.T97C-IgG2 | 17 | 313 | 506 | 20 |
| MRAL.F98C-IgG2 | 17 | 313 | 507 | 20 |
| MRAL.G99C-IgG2 | 17 | 313 | 508 | 20 |
| MRAL.Q100C-IgG2 | 17 | 313 | 509 | 20 |
| MRAL.G101C-IgG2 | 17 | 313 | 510 | 20 |
| MRAL.T102C-IgG2 | 17 | 313 | 511 | 20 |
| MRAL.K103C-IgG2 | 17 | 313 | 512 | 20 |
| MRAL.V104C-IgG2 | 17 | 313 | 513 | 20 |
| MRAL.E105C-IgG2 | 17 | 313 | 514 | 20 |
| MRAL.I106C-IgG2 | 17 | 313 | 515 | 20 |
| MRAL.K107C-IgG2 | 17 | 313 | 516 | 20 |
| k0.R108C-IgG2 | 17 | 313 | 19 | 517 |
| k0.T109C-IgG2 | 17 | 313 | 19 | 518 |
| k0.V110C-IgG2 | 17 | 313 | 19 | 519 |
| k0.A111C-IgG2 | 17 | 313 | 19 | 520 |
| k0.A112C-IgG2 | 17 | 313 | 19 | 521 |
| k0.P113C-IgG2 | 17 | 313 | 19 | 522 |
| k0.S114C-IgG2 | 17 | 313 | 19 | 523 |
| k0.V115C-IgG2 | 17 | 313 | 19 | 524 |
| k0.F116C-IgG2 | 17 | 313 | 19 | 525 |
| k0.P120C-IgG2 | 17 | 313 | 19 | 526 |
| k0.S121C-IgG2 | 17 | 313 | 19 | 527 |
| k0.D122C-IgG2 | 17 | 313 | 19 | 528 |
| k0.E123C-IgG2 | 17 | 313 | 19 | 529 |
| k0.Q124C-IgG2 | 17 | 313 | 19 | 530 |
| k0.L125C-IgG2 | 17 | 313 | 19 | 531 |
| k0.K126C-IgG2 | 17 | 313 | 19 | 532 |
| k0.S127C-IgG2 | 17 | 313 | 19 | 533 |
| k0.G128C-IgG2 | 17 | 313 | 19 | 534 |
| k0.T129C-IgG2 | 17 | 313 | 19 | 535 |
| k0.A130C-IgG2 | 17 | 313 | 19 | 536 |
| k0.S131C-IgG2 | 17 | 313 | 19 | 537 |
| k0.L136C-IgG2 | 17 | 313 | 19 | 538 |
| k0.N137C-IgG2 | 17 | 313 | 19 | 539 |
| k0.N138C-IgG2 | 17 | 313 | 19 | 540 |
| k0.F139C-IgG2 | 17 | 313 | 19 | 541 |
| k0.Y140C-IgG2 | 17 | 313 | 19 | 542 |
| k0.P141C-IgG2 | 17 | 313 | 19 | 543 |
| k0.R142C-IgG2 | 17 | 313 | 19 | 544 |
| k0.E143C-IgG2 | 17 | 313 | 19 | 545 |
| k0.A144C-IgG2 | 17 | 313 | 19 | 546 |
| k0.K145C-IgG2 | 17 | 313 | 19 | 547 |
| k0.V146C-IgG2 | 17 | 313 | 19 | 548 |
| k0.Q147C-IgG2 | 17 | 313 | 19 | 549 |
| k0.W148C-IgG2 | 17 | 313 | 19 | 550 |
| k0.K149C-IgG2 | 17 | 313 | 19 | 551 |
| k0.V150C-IgG2 | 17 | 313 | 19 | 552 |
| k0.D151C-IgG2 | 17 | 313 | 19 | 553 |
| k0.N152C-IgG2 | 17 | 313 | 19 | 554 |
| k0.A153C-IgG2 | 17 | 313 | 19 | 555 |
| k0.L154C-IgG2 | 17 | 313 | 19 | 556 |
| k0.Q155C-IgG2 | 17 | 313 | 19 | 557 |
| k0.S156C-IgG2 | 17 | 313 | 19 | 558 |
| k0.G157C-IgG2 | 17 | 313 | 19 | 559 |
| k0.N158C-IgG2 | 17 | 313 | 19 | 560 |
| k0.S159C-IgG2 | 17 | 313 | 19 | 561 |
| k0.Q160C-IgG2 | 17 | 313 | 19 | 562 |
| k0.E161C-IgG2 | 17 | 313 | 19 | 563 |
| k0.S162C-IgG2 | 17 | 313 | 19 | 564 |
| k0.V163C-IgG2 | 17 | 313 | 19 | 565 |
| k0.T164C-IgG2 | 17 | 313 | 19 | 566 |
| k0.E165C-IgG2 | 17 | 313 | 19 | 567 |
| k0.Q166C-IgG2 | 17 | 313 | 19 | 568 |
| k0.D167C-IgG2 | 17 | 313 | 19 | 569 |
| k0.S168C-IgG2 | 17 | 313 | 19 | 570 |
| k0.K169C-IgG2 | 17 | 313 | 19 | 571 |
| k0.D170C-IgG2 | 17 | 313 | 19 | 572 |
| k0.S171C-IgG2 | 17 | 313 | 19 | 573 |
| k0.T172C-IgG2 | 17 | 313 | 19 | 574 |
| k0.Y173C-IgG2 | 17 | 313 | 19 | 575 |
| k0.S174C-IgG2 | 17 | 313 | 19 | 576 |
| k0.L175C-IgG2 | 17 | 313 | 19 | 577 |
| k0.T180C-IgG2 | 17 | 313 | 19 | 578 |
| k0.L181C-IgG2 | 17 | 313 | 19 | 579 |
| k0.S182C-IgG2 | 17 | 313 | 19 | 580 |
| k0.K183C-IgG2 | 17 | 313 | 19 | 581 |
| k0.A184C-IgG2 | 17 | 313 | 19 | 582 |
| k0.D185C-IgG2 | 17 | 313 | 19 | 583 |
| k0.Y186C-IgG2 | 17 | 313 | 19 | 584 |
| k0.E187C-IgG2 | 17 | 313 | 19 | 585 |
| k0.K188C-IgG2 | 17 | 313 | 19 | 586 |
| k0.H189C-IgG2 | 17 | 313 | 19 | 587 |
| k0.K190C-IgG2 | 17 | 313 | 19 | 588 |
| k0.V191C-IgG2 | 17 | 313 | 19 | 589 |
| k0.Y192C-IgG2 | 17 | 313 | 19 | 590 |
| k0.A193C-IgG2 | 17 | 313 | 19 | 591 |
| k0.E195C-IgG2 | 17 | 313 | 19 | 592 |
| k0.V196C-IgG2 | 17 | 313 | 19 | 593 |
| k0.T197C-IgG2 | 17 | 313 | 19 | 594 |
| k0.H198C-IgG2 | 17 | 313 | 19 | 595 |
| k0.Q199C-IgG2 | 17 | 313 | 19 | 596 |
| k0.G200C-IgG2 | 17 | 313 | 19 | 597 |
| k0.L201C-IgG2 | 17 | 313 | 19 | 598 |
| k0.S202C-IgG2 | 17 | 313 | 19 | 599 |
| k0.S203C-IgG2 | 17 | 313 | 19 | 600 |
| k0.P204C-IgG2 | 17 | 313 | 19 | 601 |
| k0.V205C-IgG2 | 17 | 313 | 19 | 602 |
| k0.T206C-IgG2 | 17 | 313 | 19 | 603 |
| k0.K207C-IgG2 | 17 | 313 | 19 | 604 |
| k0.S208C-IgG2 | 17 | 313 | 19 | 605 |
| k0.F209C-IgG2 | 17 | 313 | 19 | 606 |
| k0.N210C-IgG2 | 17 | 313 | 19 | 607 |
| k0.R211C-IgG2 | 17 | 313 | 19 | 608 |
| k0.G212C-IgG2 | 17 | 313 | 19 | 609 |
| k0.E213C-IgG2 | 17 | 313 | 19 | 610 |

### Reference Example 10-2 Assessment of Electrophoretic Mobility in Polyacrylamide Gel of Antibodies Having Cysteine Substitution at Various Positions of IgG2

[1014] Similarly to Reference Example 8-2, non-reducing SDS-PAGE was carried out with the MRA-IgG2 variants produced in Reference Example 10-1, the gel image was captured, and bands were analyzed.

[1015] From the obtained gel image, the variants were classified into 7 groups according to the band pattern of each of the MRA-IgG2 variants: Single (one band at a molecular weight region near 140 kDa), Double (two bands at a molecular weight region near 140 kDa), Triple (three bands at a molecular weight region near 140 kDa), Several (four or more bands at a molecular weight region near 140 kDa), LMW (band(s) at a molecular weight region lower than near 140 kDa), HMW (band(s) at a molecular weight region higher than near 140 kDa), and Faint (band(s) blurry and difficult to determine). Grouping results of the band patterns for MRA-IgG2 heavy chain variants and MRA-IgG2 light chain variants are respectively shown in Tables 48 and 49. From Tables 48 and 49, variants classified into the Double and Triple groups are shown in Table 50. It is noted that while Table 33 indicates “no data” for MRAL.K107C-IgG2, position 107 (Kabat numbering), which is the position of cysteine substitution in this variant, is a position where the residue structurally exposed to the surface is present in the hinge region. Accordingly, this variant may also be classified as “Double”.

TABLE 48

| MRA-IgG2 heavy chain | |
|---|---|
| variant name | Group |
| MRAH.Q5C-IgG2 | Double |
| MRAH.E6C-IgG2 | Double |
| MRAH.S7C-IgG2 | Faint |
| MRAH.G8C-IgG2 | Double |
| MRAH.P9C-IgG2 | Double |
| MRAH.G10C-IgG2 | Double |
| MRAH.L11C-IgG2 | Double |
| MRAH.V12C-IgG2 | Double |
| MRAH.R13C-IgG2 | Double |
| MRAH.P14C-IgG2 | Double |
| MRAH.S15C-IgG2 | Double |
| MRAH.Q16C-IgG2 | Double |
| MRAH.T17C-IgG2 | Double |
| MRAH.L18C-IgG2 | Faint |
| MRAH.S19C-IgG2 | Double |
| MRAH.L20C-IgG2 | Faint |
| MRAH.T21C-IgG2 | Double |
| MRAH.T23C-IgG2 | Double |
| MRAH.S25C-IgG2 | Double |
| MRAH.G26C-IgG2 | Double |
| MRAH.S28C-IgG2 | Double |
| MRAH.T30C-IgG2 | Double |
| MRAH.S31C-IgG2 | Double |
| MRAH.W35C-IgG2 | Double |
| MRAH.S35aC-IgG2 | Faint |
| MRAH.Y50C-IgG2 | Faint |
| MRAH.I51C-IgG2 | Double |
| MRAH.S52C-IgG2 | Double |
| MRAH.S62C-IgG2 | Double |
| MRAH.L63C-IgG2 | Double |
| MRAH.K64C-IgG2 | Double |
| MRAH.S65C-IgG2 | Double |
| MRAH.R66C-IgG2 | Double |
| MRAH.V67C-IgG2 | Faint |
| MRAH.T68C-IgG2 | Double |
| MRAH.L70C-IgG2 | Double |
| MRAH.D72C-IgG2 | Double |
| MRAH.T73C-IgG2 | Double |
| MRAH.S74C-IgG2 | HMW |
| MRAH.K75C-IgG2 | Double |
| MRAH.N76C-IgG2 | no data |
| MRAH.Q77C-IgG2 | Double |
| MRAH.S79C-IgG2 | Double |
| MRAH.L80C-IgG2 | Faint |
| MRAH.R81C-IgG2 | Double |
| MRAH.L82C-IgG2 | Faint |
| MRAH.S82aC-IgG2 | Double |
| MRAH.S82bC-IgG2 | Double |
| MRAH.V82cC-IgG2 | Faint |
| MRAH.D101C-IgG2 | Double |
| MRAH.Y102C-IgG2 | Double |
| MRAH.S112C-IgG2 | Double |
| MRAH.S113C-IgG2 | Double |
| G2d.A118C-IgG2 | LMW |
| G2d.S119C-IgG2 | Double |
| G2d.T120C-IgG2 | Double |
| G2d.K121C-IgG2 | Double |
| G2d.G122C-IgG2 | Double |
| G2d.P123C-IgG2 | LMW |
| G2d.S124C-IgG2 | Double |
| G2d.V125C-IgG2 | LMW |
| G2d.F126C-IgG2 | Double |
| G2d.P127C-IgG2 | Faint |
| G2d.S132C-IgG2 | Double |
| G2d.R133C-IgG2 | Double |
| G2d.S134C-IgG2 | Double |
| G2d.T135C-IgG2 | Double |
| G2d.S136C-IgG2 | Double |
| G2d.E137C-IgG2 | Double |
| G2d.S138C-IgG2 | Double |
| G2d.T139C-IgG2 | Faint |
| G2d.A140C-IgG2 | Double |
| G2d.A141C-IgG2 | Faint |
| G2d.D148C-IgG2 | Double |
| G2d.Y149C-IgG2 | Double |
| G2d.F150C-IgG2 | LMW |
| G2d.P151C-IgG2 | no data |
| G2d.E152C-IgG2 | LMW |
| G2d.P153C-IgG2 | HMW |
| G2d.V154C-IgG2 | Faint |
| G2d.T155C-IgG2 | Double |
| G2d.V156C-IgG2 | Double |
| G2d.S157C-IgG2 | no data |
| G2d.W158C-IgG2 | no data |
| G2d.N159C-IgG2 | Double |
| G2d.S160C-IgG2 | Double |
| G2d.G161C-IgG2 | Double |
| G2d.A162C-IgG2 | Double |
| G2d.L163C-IgG2 | Double |
| G2d.T164C-IgG2 | Double |
| G2d.S165C-IgG2 | LMW |
| G2d.G166C-IgG2 | Faint |
| G2d.V167C-IgG2 | Double |
| G2d.V173C-IgG2 | Double |
| G2d.L174C-IgG2 | LMW |
| G2d.Q175C-IgG2 | Double |
| G2d.S176C-IgG2 | Double |
| G2d.S177C-IgG2 | Double |
| G2d.G178C-IgG2 | Double |
| G2d.L179C-IgG2 | Double |
| G2d.Y180C-IgG2 | LMW |
| G2d.V186C-IgG2 | LMW |
| G2d.T187C-IgG2 | Double |
| G2d.V188C-IgG2 | Double |
| G2d.P189C-IgG2 | Double |
| G2d.S190C-IgG2 | Double |
| G2d.S191C-IgG2 | Double |
| G2d.N192C-IgG2 | Double |
| G2d.F193C-IgG2 | Double |
| G2d.G194C-IgG2 | Double |
| G2d.T195C-IgG2 | Double |
| G2d.Q196C-IgG2 | Double |
| G2d.T197C-IgG2 | Double |
| G2d.Y198C-IgG2 | LMW |
| G2d.T199C-IgG2 | LMW |
| G2d.N201C-IgG2 | LMW |
| G2d.V202C-IgG2 | LMW |
| G2d.D203C-IgG2 | LMW |
| G2d.H204C-IgG2 | LMW |
| G2d.K205C-IgG2 | LMW |
| G2d.P206C-IgG2 | LMW |
| G2d.S207C-IgG2 | LMW |
| G2d.N208C-IgG2 | Double |
| G2d.T209C-IgG2 | Double |
| G2d.K210C-IgG2 | Double |
| G2d.V211C-IgG2 | Double |
| G2d.D212C-IgG2 | Double |
| G2d.K213C-IgG2 | Double |
| G2d.T214C-IgG2 | Single |
| G2d.V215C-IgG2 | Single |
| G2d.E216C-IgG2 | Single |
| G2d.R217C-IgG2 | Double |
| G2d.K218C-IgG2 | Double |

TABLE 49

| MRA-IgG2 light chain | |
|---|---|
| variant name | Group |
| MRAL.T5C-IgG2 | Double |
| MRAL.Q6C-IgG2 | Faint |
| MRAL.S7C-IgG2 | Double |
| MRAL.P8C-IgG2 | no data |
| MRAL.S9C-IgG2 | Double |
| MRAL.S10C-IgG2 | Double |
| MRAL.L11C-IgG2 | Double |
| MRAL.S12C-IgG2 | Double |
| MRAL.A13C-IgG2 | Double |
| MRAL.S14C-IgG2 | Double |
| MRAL.V15C-IgG2 | Double |
| MRAL.G16C-IgG2 | Double |
| MRAL.D17C-IgG2 | Double |
| MRAL.R18C-IgG2 | Double |
| MRAL.V19C-IgG2 | Double |
| MRAL.T20C-IgG2 | Double |
| MRAL.I21C-IgG2 | Double |
| MRAL.T22C-IgG2 | Double |
| MRAL.A25C-IgG2 | Faint |
| MRAL.S26C-IgG2 | Double |
| MRAL.Q27C-IgG2 | Double |
| MRAL.Y32C-IgG2 | Double |
| MRAL.L33C-IgG2 | Faint |
| MRAL.N34C-IgG2 | Faint |
| MRAL.Y50C-IgG2 | Double |
| MRAL.T51C-IgG2 | Double |
| MRAL.H55C-IgG2 | Double |
| MRAL.S56C-IgG2 | Double |
| MRAL.G57C-IgG2 | Double |
| MRAL.V58C-IgG2 | Double |
| MRAL.P59C-IgG2 | Double |
| MRAL.S60C-IgG2 | Double |
| MRAL.R61C-IgG2 | Double |
| MRAL.F62C-IgG2 | Faint |
| MRAL.S63C-IgG2 | Double |
| MRAL.S65C-IgG2 | Double |
| MRAL.S67C-IgG2 | Double |
| MRAL.G68C-IgG2 | Double |
| MRAL.T69C-IgG2 | Double |
| MRAL.D70C-IgG2 | Double |
| MRAL.T72C-IgG2 | Double |
| MRAL.F73C-IgG2 | Faint |
| MRAL.T74C-IgG2 | Double |
| MRAL.I75C-IgG2 | no data |
| MRAL.S76C-IgG2 | Double |
| MRAL.S77C-IgG2 | Double |
| MRAL.L78C-IgG2 | Faint |
| MRAL.Q79C-IgG2 | Double |
| MRAL.Y96C-IgG2 | Faint |
| MRAL.T97C-IgG2 | Double |
| MRAL.F98C-IgG2 | Faint |
| MRAL.G99C-IgG2 | Double |
| MRAL.Q100C-IgG2 | Double |
| MRAL.G101C-IgG2 | Double |
| MRAL.T102C-IgG2 | Faint |
| MRAL.K103C-IgG2 | Double |
| MRAL.V104C-IgG2 | Faint |
| MRAL.E105C-IgG2 | Double |
| MRAL.I106C-IgG2 | Faint |
| MRAL.K107C-IgG2 | no data |
| k0.R108C-IgG2 | Double |
| k0.T109C-IgG2 | Double |
| k0.V110C-IgG2 | Double |
| k0.A111C-IgG2 | Double |
| k0.A112C-IgG2 | Double |
| k0.P113C-IgG2 | Double |
| k0.S114C-IgG2 | Double |
| k0.V115C-IgG2 | Faint |
| k0.F116C-IgG2 | Double |
| k0.P120C-IgG2 | Faint |
| k0.S121C-IgG2 | Faint |
| k0.D122C-IgG2 | LMW |
| k0.E123C-IgG2 | Double |
| k0.Q124C-IgG2 | Faint |
| k0.L125C-IgG2 | Double |
| k0.K126C-IgG2 | Triple |
| k0.S127C-IgG2 | Double |
| k0.G128C-IgG2 | Double |
| k0.T129C-IgG2 | Double |
| k0.A130C-IgG2 | Faint |
| k0.S131C-IgG2 | Faint |
| k0.L136C-IgG2 | Faint |
| k0.N137C-IgG2 | no data |
| k0.N138C-IgG2 | Double |
| k0.F139C-IgG2 | Faint |
| k0.Y140C-IgG2 | Faint |
| k0.P141C-IgG2 | Double |
| k0.R142C-IgG2 | Double |
| k0.E143C-IgG2 | Double |
| k0.A144C-IgG2 | Double |
| k0.K145C-IgG2 | Double |
| k0.V146C-IgG2 | Faint |
| k0.Q147C-IgG2 | Double |
| k0.W148C-IgG2 | no data |
| k0.K149C-IgG2 | Double |
| k0.V150C-IgG2 | Faint |
| k0.D151C-IgG2 | Double |
| k0.N152C-IgG2 | Double |
| k0.A153C-IgG2 | Double |
| k0.L154C-IgG2 | Double |
| k0.Q155C-IgG2 | Double |
| k0.S156C-IgG2 | Double |
| k0.G157C-IgG2 | Double |
| k0.N158C-IgG2 | Double |
| k0.S159C-IgG2 | Double |
| k0.Q160C-IgG2 | Double |
| k0.E161C-IgG2 | Double |
| k0.S162C-IgG2 | Double |
| k0.V163C-IgG2 | Double |
| k0.T164C-IgG2 | Double |
| k0.E165C-IgG2 | Double |
| k0.Q166C-IgG2 | Double |
| k0.D167C-IgG2 | Double |
| k0.S168C-IgG2 | Double |
| k0.K169C-IgG2 | Double |
| k0.D170C-IgG2 | Double |
| k0.S171C-IgG2 | Double |
| k0.T172C-IgG2 | Double |
| k0.Y173C-IgG2 | Faint |
| k0.S174C-IgG2 | Faint |
| k0.L175C-IgG2 | Faint |
| k0.T180C-IgG2 | Double |
| k0.L181C-IgG2 | Double |
| k0.S182C-IgG2 | Double |
| k0.K183C-IgG2 | Double |
| k0.A184C-IgG2 | Double |
| k0.D185C-IgG2 | Double |
| k0.Y186C-IgG2 | Double |
| k0.E187C-IgG2 | LMW |
| k0.K188C-IgG2 | Double |
| k0.H189C-IgG2 | Faint |
| k0.K190C-IgG2 | LMW |
| k0.V191C-IgG2 | Double |
| k0.Y192C-IgG2 | Double |
| k0.A193C-IgG2 | Double |
| k0.E195C-IgG2 | Double |
| k0.V196C-IgG2 | Double |
| k0.T197C-IgG2 | Double |
| k0.H198C-IgG2 | Faint |
| k0.Q199C-IgG2 | Double |
| k0.G200C-IgG2 | Triple |
| k0.L201C-IgG2 | Triple |
| k0.S202C-IgG2 | Double |
| k0.S203C-IgG2 | Triple |
| k0.P204C-IgG2 | Double |
| k0.V205C-IgG2 | Triple |
| k0.T206C-IgG2 | Double |
| k0.K207C-IgG2 | Triple |
| k0.S208C-IgG2 | Double |
| k0.F209C-IgG2 | LMW |
| k0.N210C-IgG2 | LMW |
| k0.R211C-IgG2 | LMW |
| k0.G212C-IgG2 | Double |
| k0.E213C-IgG2 | Double |

TABLE 50

| MRA-IgG2 variant | |
|---|---|
| name | Group |
| MRAH.Q5C-IgG2 | Double |
| MRAH.E6C-IgG2 | Double |
| MRAH.G8C-IgG2 | Double |
| MRAH.P9C-IgG2 | Double |
| MRAH.G10C-IgG2 | Double |
| MRAH.L11C-IgG2 | Double |
| MRAH.V12C-IgG2 | Double |
| MRAH.R13C-IgG2 | Double |
| MRAH.P14C-IgG2 | Double |
| MRAH.S15C-IgG2 | Double |
| MRAH.Q16C-IgG2 | Double |
| MRAH.T17C-IgG2 | Double |
| MRAH.S19C-IgG2 | Double |
| MRAH.T21C-IgG2 | Double |
| MRAH.T23C-IgG2 | Double |
| MRAH.S25C-IgG2 | Double |
| MRAH.G26C-IgG2 | Double |
| MRAH.S28C-IgG2 | Double |
| MRAH.T30C-IgG2 | Double |
| MRAH.S31C-IgG2 | Double |
| MRAH.W35C-IgG2 | Double |
| MRAH.I51C-IgG2 | Double |
| MRAH.S52C-IgG2 | Double |
| MRAH.S62C-IgG2 | Double |
| MRAH.L63C-IgG2 | Double |
| MRAH.K64C-IgG2 | Double |
| MRAH.S65C-IgG2 | Double |
| MRAH.R66C-IgG2 | Double |
| MRAH.T68C-IgG2 | Double |
| MRAH.L70C-IgG2 | Double |
| MRAH.D72C-IgG2 | Double |
| MRAH.T73C-IgG2 | Double |
| MRAH.K75C-IgG2 | Double |
| MRAH.Q77C-IgG2 | Double |
| MRAH.S79C-IgG2 | Double |
| MRAH.R81C-IgG2 | Double |
| MRAH.S82aC-IgG2 | Double |
| MRAH.S82bC-IgG2 | Double |
| MRAH.D101C-IgG2 | Double |
| MRAH.Y102C-IgG2 | Double |
| MRAH.S112C-IgG2 | Double |
| MRAH.S113C-IgG2 | Double |
| G2d.S119C-IgG2 | Double |
| G2d.T120C-IgG2 | Double |
| G2d.K121C-IgG2 | Double |
| G2d.G122C-IgG2 | Double |
| G2d.S124C-IgG2 | Double |
| G2d.F126C-IgG2 | Double |
| G2d.S132C-IgG2 | Double |
| G2d.R133C-IgG2 | Double |
| G2d.S134C-IgG2 | Double |
| G2d.T135C-IgG2 | Double |
| G2d.S136C-IgG2 | Double |
| G2d.E137C-IgG2 | Double |
| G2d.S138C-IgG2 | Double |
| G2d.A140C-IgG2 | Double |
| G2d.D148C-IgG2 | Double |
| G2d.Y149C-IgG2 | Double |
| G2d.T155C-IgG2 | Double |
| G2d.V156C-IgG2 | Double |
| G2d.N159C-IgG2 | Double |
| G2d.S160C-IgG2 | Double |
| G2d.G161C-IgG2 | Double |
| G2d.A162C-IgG2 | Double |
| G2d.L163C-IgG2 | Double |
| G2d.T164C-IgG2 | Double |
| G2d.V167C-IgG2 | Double |
| G2d.V173C-IgG2 | Double |
| G2d.Q175C-IgG2 | Double |
| G2d.S176C-IgG2 | Double |
| G2d.S177C-IgG2 | Double |
| G2d.G178C-IgG2 | Double |
| G2d.L179C-IgG2 | Double |
| G2d.T187C-IgG2 | Double |
| G2d.V188C-IgG2 | Double |
| G2d.P189C-IgG2 | Double |
| G2d.S190C-IgG2 | Double |
| G2d.S191C-IgG2 | Double |
| G2d.N192C-IgG2 | Double |
| G2d.F193C-IgG2 | Double |
| G2d.G194C-IgG2 | Double |
| G2d.T195C-IgG2 | Double |
| G2d.Q196C-IgG2 | Double |
| G2d.T197C-IgG2 | Double |
| G2d.N208C-IgG2 | Double |
| G2d.T209C-IgG2 | Double |
| G2d.K210C-IgG2 | Double |
| G2d.V211C-IgG2 | Double |
| G2d.D212C-IgG2 | Double |
| G2d.K213C-IgG2 | Double |
| G2d.R217C-IgG2 | Double |
| G2d.K218C-IgG2 | Double |
| MRAL.T5C-IgG2 | Double |
| MRAL.S7C-IgG2 | Double |
| MRAL.S9C-IgG2 | Double |
| MRAL.S10C-IgG2 | Double |
| MRAL.L11C-IgG2 | Double |
| MRAL.S12C-IgG2 | Double |
| MRAL.A13C-IgG2 | Double |
| MRAL.S14C-IgG2 | Double |
| MRAL.V15C-IgG2 | Double |
| MRAL.G16C-IgG2 | Double |
| MRAL.D17C-IgG2 | Double |
| MRAL.R18C-IgG2 | Double |
| MRAL.V19C-IgG2 | Double |
| MRAL.T20C-IgG2 | Double |
| MRAL.I21C-IgG2 | Double |
| MRAL.T22C-IgG2 | Double |
| MRAL.S26C-IgG2 | Double |
| MRAL.Q27C-IgG2 | Double |
| MRAL.Y32C-IgG2 | Double |
| MRAL.Y50C-IgG2 | Double |
| MRAL.T51C-IgG2 | Double |
| MRAL.H55C-IgG2 | Double |
| MRAL.S56C-IgG2 | Double |
| MRAL.G57C-IgG2 | Double |
| MRAL.V58C-IgG2 | Double |
| MRAL.P59C-IgG2 | Double |
| MRAL.S60C-IgG2 | Double |
| MRAL.R61C-IgG2 | Double |
| MRAL.S63C-IgG2 | Double |
| MRAL.S65C-IgG2 | Double |
| MRAL.S67C-IgG2 | Double |
| MRAL.G68C-IgG2 | Double |
| MRAL.T69C-IgG2 | Double |
| MRAL.D70C-IgG2 | Double |
| MRAL.T72C-IgG2 | Double |
| MRAL.T74C-IgG2 | Double |
| MRAL.S76C-IgG2 | Double |
| MRAL.S77C-IgG2 | Double |
| MRAL.Q79C-IgG2 | Double |
| MRAL.T97C-IgG2 | Double |
| MRAL.G99C-IgG2 | Double |
| MRAL.Q100C-IgG2 | Double |
| MRAL.G101C-IgG2 | Double |
| MRAL.K103C-IgG2 | Double |
| MRAL.E105C-IgG2 | Double |
| k0.R108C-IgG2 | Double |
| k0.T109C-IgG2 | Double |
| k0.V110C-IgG2 | Double |
| k0.A111C-IgG2 | Double |
| k0.A112C-IgG2 | Double |
| k0.P113C-IgG2 | Double |
| k0.S114C-IgG2 | Double |
| k0.F116C-IgG2 | Double |
| k0.E123C-IgG2 | Double |
| k0.L125C-IgG2 | Double |
| k0.K126C-IgG2 | Triple |
| k0.S127C-IgG2 | Double |
| k0.G128C-IgG2 | Double |
| k0.T129C-IgG2 | Double |
| k0.N138C-IgG2 | Double |
| k0.P141C-IgG2 | Double |
| k0.R142C-IgG2 | Double |
| k0.E143C-IgG2 | Double |
| k0.A144C-IgG2 | Double |
| k0.K145C-IgG2 | Double |
| k0.Q147C-IgG2 | Double |
| k0.K149C-IgG2 | Double |
| k0.D151C-IgG2 | Double |
| k0.N152C-IgG2 | Double |
| k0.A153C-IgG2 | Double |
| k0.L154C-IgG2 | Double |
| k0.Q155C-IgG2 | Double |
| k0.S156C-IgG2 | Double |
| k0.G157C-IgG2 | Double |
| k0.N158C-IgG2 | Double |
| k0.S159C-IgG2 | Double |
| k0.Q160C-IgG2 | Double |
| k0.E161C-IgG2 | Double |
| k0.S162C-IgG2 | Double |
| k0.V163C-IgG2 | Double |
| k0.T164C-IgG2 | Double |
| k0.E165C-IgG2 | Double |
| k0.Q166C-IgG2 | Double |
| k0.D167C-IgG2 | Double |
| k0.S168C-IgG2 | Double |
| k0.K169C-IgG2 | Double |
| k0.D170C-IgG2 | Double |
| k0.S171C-IgG2 | Double |
| k0.T172C-IgG2 | Double |
| k0.T180C-IgG2 | Double |
| k0.L181C-IgG2 | Double |
| k0.S182C-IgG2 | Double |
| k0.K183C-IgG2 | Double |
| k0.A184C-IgG2 | Double |
| k0.D185C-IgG2 | Double |
| k0.Y186C-IgG2 | Double |
| k0.K188C-IgG2 | Double |
| k0.V191C-IgG2 | Double |
| k0.Y192C-IgG2 | Double |
| k0.A193C-IgG2 | Double |
| k0.E195C-IgG2 | Double |
| k0.V196C-IgG2 | Double |
| k0.T197C-IgG2 | Double |
| k0.Q199C-IgG2 | Double |
| k0.G200C-IgG2 | Triple |
| k0.L201C-IgG2 | Triple |
| k0.S202C-IgG2 | Double |
| k0.S203C-IgG2 | Triple |
| k0.P204C-IgG2 | Double |
| k0.V205C-IgG2 | Triple |
| k0.T206C-IgG2 | Double |
| k0.K207C-IgG2 | Triple |
| k0.S208C-IgG2 | Double |
| k0.G212C-IgG2 | Double |
| k0.E213C-IgG2 | Double |

### Reference Example 11 Assessment of Antibodies Having Cysteine Substitution at Various Positions of the Lambda Chain

### Reference Example 11-1 Production of Antibodies Having Cysteine Substitution at Various Positions of the Lambda Chain

[1016] The light chain (Lambda chain) of an anti-human CXCL10 neutralizing antibody, G7-IgG1 (heavy chain: G7H-G1T4 (SEQ ID NO: 314), light chain: G7L-LT0 (SEQ ID NO: 316)), was subjected to a study in which an arbitrary amino acid residue structurally exposed to the surface was substituted with cysteine.

[1017] Amino acid residues within the G7-IgG1 light chain variable region (G7L, SEQ ID NO: 317) were substituted with cysteine to produce variants of the G7-IgG1 light chain variable region shown in Table 51. These variants of the G7-IgG1 light chain variable region were each linked with the G7-IgG1 light chain constant region (LT0, SEQ ID NO: 318) to produce G7-IgG1 light chain variants, and expression vectors encoding the corresponding genes were produced by a method known to the person skilled in the art. In addition, amino acid residues within the G7-IgG1 light chain constant region (LT0, SEQ ID NO: 318) were substituted with cysteine to produce variants of the G7-IgG1 light chain constant region shown in Table 52. These variants of the G7-IgG1 heavy chain constant region were each linked with the G7-IgG1 light chain variable region (G7L, SEQ ID NO: 317) to produce G7-IgG1 light chain variants, and expression vectors encoding the corresponding genes were produced by a method known to the person skilled in the art.

TABLE 51

| | Position of cysteine | |
|---|---|---|
| Variant of G7-IgG1 light | substitution | SEQ ID |
| chain variable region | (Kabat numbering) | NO: |
| G7L.T5C | 5 | 771 |
| G7L.Q6C | 6 | 772 |
| G7L.P7C | 7 | 773 |
| G7L.P8C | 8 | 774 |
| G7L.S9C | 9 | 775 |
| G7L.A11C | 11 | 776 |
| G7L.S12C | 12 | 777 |
| G7L.G13C | 13 | 778 |
| G7L.T14C | 14 | 779 |
| G7L.P15C | 15 | 780 |
| G7L.G16C | 16 | 781 |
| G7L.Q17C | 17 | 782 |
| G7L.R18C | 18 | 783 |
| G7L.V19C | 19 | 784 |
| G7L.T20C | 20 | 785 |
| G7L.I21C | 21 | 786 |
| G7L.S22C | 22 | 787 |
| G7L.G25C | 25 | 788 |
| G7L.S26C | 26 | 789 |
| G7L.S27C | 27 | 790 |
| G7L.S27aC | 27a | 791 |
| G7L.T32C | 32 | 792 |
| G7L.V33C | 33 | 793 |
| G7L.N34C | 34 | 794 |
| G7L.N50C | 50 | 795 |
| G7L.N51C | 51 | 796 |
| G7L.P55C | 55 | 797 |
| G7L.S56C | 56 | 798 |
| G7L.G57C | 57 | 799 |
| G7L.I58C | 58 | 800 |
| G7L.P59C | 59 | 801 |
| G7L.D60C | 60 | 802 |
| G7L.R61C | 61 | 803 |
| G7L.F62C | 62 | 804 |
| G7L.S63C | 63 | 805 |
| G7L.S65C | 65 | 806 |
| G7L.S67C | 67 | 807 |
| G7L.G68C | 68 | 808 |
| G7L.T69C | 69 | 809 |
| G7L.S70C | 70 | 810 |
| G7L.S72C | 72 | 811 |
| G7L.L73C | 73 | 812 |
| G7L.V74C | 74 | 813 |
| G7L.I75C | 75 | 814 |
| G7L.S76C | 76 | 815 |
| G7L.G77C | 77 | 816 |
| G7L.L78C | 78 | 817 |
| G7L.Q79C | 79 | 818 |
| G7L.R96C | 96 | 819 |
| G7L.V97C | 97 | 820 |
| G7L.F98C | 98 | 821 |
| G7L.G99C | 99 | 822 |
| G7L.G100C | 100 | 823 |
| G7L.G101C | 101 | 824 |
| G7L.T102C | 102 | 825 |
| G7L.K103C | 103 | 826 |
| G7L.L104C | 104 | 827 |
| G7L.T105C | 105 | 828 |
| G7L.V106C | 106 | 829 |
| G7L.L106aC | 106a | 830 |

TABLE 52

| | Position of cysteine | |
|---|---|---|
| Variant of G7-IgG1 light | substitution | SEQ ID |
| chain constant region | (Rabat numbering) | NO: |
| LT0.Q108C | 108 | 831 |
| LT0.P109C | 109 | 832 |
| LT0.K110C | 110 | 833 |
| LT0.A111C | 111 | 834 |
| LT0.A112C | 112 | 835 |
| LT0.P113C | 113 | 836 |
| LT0.S114C | 114 | 837 |
| LT0.V115C | 115 | 838 |
| LT0.T116C | 116 | 839 |
| LT0.P120C | 120 | 840 |
| LT0.S121C | 121 | 841 |
| LT0.S122C | 122 | 842 |
| LT0.E123C | 123 | 843 |
| LT0.E124C | 124 | 844 |
| LT0.L125C | 125 | 845 |
| LT0.Q126C | 126 | 846 |
| LT0.A127C | 127 | 847 |
| LT0.N128C | 128 | 848 |
| LT0.K129C | 129 | 849 |
| LT0.A130C | 130 | 850 |
| LT0.T131C | 131 | 851 |
| LT0.I136C | 136 | 852 |
| LT0.S137C | 137 | 853 |
| LT0.D138C | 138 | 854 |
| LT0.F139C | 139 | 855 |
| LT0.Y140C | 140 | 856 |
| LT0.P141C | 141 | 857 |
| LT0.G142C | 142 | 858 |
| LT0.A143C | 143 | 859 |
| LT0.V144C | 144 | 860 |
| LT0.T145C | 145 | 861 |
| LT0.V146C | 146 | 862 |
| LT0.A147C | 147 | 863 |
| LT0.W148C | 148 | 864 |
| LT0.K149C | 149 | 865 |
| LT0.A150C | 150 | 866 |
| LT0.D151C | 151 | 867 |
| LT0.S152C | 152 | 868 |
| LT0.S153C | 153 | 869 |
| LT0.P154C | 154 | 870 |
| LT0.V155C | 155 | 871 |
| LT0.K156C | 156 | 872 |
| LT0.A157C | 157 | 873 |
| LT0.G158C | 158 | 874 |
| LT0.V159C | 159 | 875 |
| LT0.E160C | 160 | 876 |
| LT0.T161C | 161 | 877 |
| LT0.T162C | 162 | 878 |
| LT0.T163C | 163 | 879 |
| LT0.P164C | 164 | 880 |
| LT0.S165C | 165 | 881 |
| LT0.K166C | 166 | 882 |
| LT0.Q167C | 167 | 883 |
| LT0.S168C | 168 | 884 |
| LT0.N170C | 170 | 885 |
| LT0.N171C | 171 | 886 |
| LT0.K172C | 172 | 887 |
| LT0.Y173C | 173 | 888 |
| LT0.A174C | 174 | 889 |
| LT0.A175C | 175 | 890 |
| LT0.S180C | 180 | 891 |
| LT0.L181C | 181 | 892 |
| LT0.T182C | 182 | 893 |
| LT0.P183C | 183 | 894 |
| LT0.E184C | 184 | 895 |
| LT0.Q185C | 185 | 896 |
| LT0.W186C | 186 | 897 |
| LT0.K187C | 187 | 898 |
| LT0.S188C | 188 | 899 |
| LT0.H189C | 189 | 900 |
| LT0.R190C | 190 | 901 |
| LT0.S191C | 191 | 902 |
| LT0.Y192C | 192 | 903 |
| LT0.S193C | 193 | 904 |
| LT0.Q195C | 195 | 905 |
| LT0.V196C | 196 | 906 |
| LT0.T197C | 197 | 907 |
| LT0.H198C | 198 | 908 |
| LT0.E199C | 199 | 909 |
| LT0.G200C | 200 | 910 |
| LT0.S203C | 203 | 911 |
| LT0.T204C | 204 | 912 |
| LT0.V205C | 205 | 913 |
| LT0.E206C | 206 | 914 |
| LT0.K207C | 207 | 915 |
| LT0.T208C | 208 | 916 |
| LT0.V209C | 209 | 917 |
| LT0.A210C | 210 | 918 |
| LT0.P211C | 211 | 919 |
| LT0.T212C | 212 | 920 |
| LT0.E213C | 213 | 921 |

[1018] The G7-IgG1 light chain variants produced above were combined with the G7-IgG1 heavy chain and the resultant G7-IgG1 light chain variants shown in Table 53 were expressed by transient expression using FreeStyle293 cells (Invitrogen) or Expi293 cells (Life technologies) by a method known to the person skilled in the art, and purified with Protein A by a method known to the person skilled in the art.

TABLE 53

| | Heavy | Heavy | Light | Light |
|---|---|---|---|---|
| | chain | chain | chain | chain |
| | variable | constant | variable | constant |
| | region | region | region | region |
| G7-IgG1 light chain | SEQ | SEQ | SEQ | SEQ |
| variant name | ID NO: | ID NO: | ID NO: | ID NO: |
| G7L.T5C-IgG1 | 315 | 18 | 771 | 318 |
| G7L.Q6C-IgG1 | 315 | 18 | 772 | 318 |
| G7L.P7C-IgG1 | 315 | 18 | 773 | 318 |
| G7L.P8C-IgG1 | 315 | 18 | 774 | 318 |
| G7L.S9C-IgG1 | 315 | 18 | 775 | 318 |
| G7L.A11C-IgG1 | 315 | 18 | 776 | 318 |
| G7L.S12C-IgG1 | 315 | 18 | 777 | 318 |
| G7L.G13C-IgG1 | 315 | 18 | 778 | 318 |
| G7L.T14C-IgG1 | 315 | 18 | 779 | 318 |
| G7L.P15C-IgG1 | 315 | 18 | 780 | 318 |
| G7L.G16C-IgG1 | 315 | 18 | 781 | 318 |
| G7L.Q17C-IgG1 | 315 | 18 | 782 | 318 |
| G7L.R18C-IgG1 | 315 | 18 | 783 | 318 |
| G7L.V19C-IgG1 | 315 | 18 | 784 | 318 |
| G7L.T20C-IgG1 | 315 | 18 | 785 | 318 |
| G7L.I21C-IgG1 | 315 | 18 | 786 | 318 |
| G7L.S22C-IgG1 | 315 | 18 | 787 | 318 |
| G7L.G25C-IgG1 | 315 | 18 | 788 | 318 |
| G7L.S26C-IgG1 | 315 | 18 | 789 | 318 |
| G7L.S27C-IgG1 | 315 | 18 | 790 | 318 |
| G7L.S27aC-IgG1 | 315 | 18 | 791 | 318 |
| G7L.T32C-IgG1 | 315 | 18 | 792 | 318 |
| G7L.V33C-IgG1 | 315 | 18 | 793 | 318 |
| G7L.N34C-IgG1 | 315 | 18 | 794 | 318 |
| G7L.N50C-IgG1 | 315 | 18 | 795 | 318 |
| G7L.N51C-IgG1 | 315 | 18 | 796 | 318 |
| G7L.P55C-IgG1 | 315 | 18 | 797 | 318 |
| G7L.S56C-IgG1 | 315 | 18 | 798 | 318 |
| G7L.G57C-IgG1 | 315 | 18 | 799 | 318 |
| G7L.I58C-IgG1 | 315 | 18 | 800 | 318 |
| G7L.P59C-IgG1 | 315 | 18 | 801 | 318 |
| G7L.D60C-IgG1 | 315 | 18 | 802 | 318 |
| G7L.R61C-IgG1 | 315 | 18 | 803 | 318 |
| G7L.F62C-IgG1 | 315 | 18 | 804 | 318 |
| G7L.S63C-IgG1 | 315 | 18 | 805 | 318 |
| G7L.S65C-IgG1 | 315 | 18 | 806 | 318 |
| G7L.S67C-IgG1 | 315 | 18 | 807 | 318 |
| G7L.G68C-IgG1 | 315 | 18 | 808 | 318 |
| G7L.T69C-IgG1 | 315 | 18 | 809 | 318 |
| G7L.S70C-IgG1 | 315 | 18 | 810 | 318 |
| G7L.S72C-IgG1 | 315 | 18 | 811 | 318 |
| G7L.L73C-IgG1 | 315 | 18 | 812 | 318 |
| G7L.V74C-IgG1 | 315 | 18 | 813 | 318 |
| G7L.I75C-IgG1 | 315 | 18 | 814 | 318 |
| G7L.S76C-IgG1 | 315 | 18 | 815 | 318 |
| G7L.G77C-IgG1 | 315 | 18 | 816 | 318 |
| G7L.L78C-IgG1 | 315 | 18 | 817 | 318 |
| G7L.Q79C-IgG1 | 315 | 18 | 818 | 318 |
| G7L.R96C-IgG1 | 315 | 18 | 819 | 318 |
| G7L.V97C-IgG1 | 315 | 18 | 820 | 318 |
| G7L.F98C-IgG1 | 315 | 18 | 821 | 318 |
| G7L.G99C-IgG1 | 315 | 18 | 822 | 318 |
| G7L.G100C-IgG1 | 315 | 18 | 823 | 318 |
| G7L.G101C-IgG1 | 315 | 18 | 824 | 318 |
| G7L.T102C-IgG1 | 315 | 18 | 825 | 318 |
| G7L.K103C-IgG1 | 315 | 18 | 826 | 318 |
| G7L.L104C-IgG1 | 315 | 18 | 827 | 318 |
| G7L.T105C-IgG1 | 315 | 18 | 828 | 318 |
| G7L.V106C-IgG1 | 315 | 18 | 829 | 318 |
| G7L.L106aC-IgG1 | 315 | 18 | 830 | 318 |
| LT0.Q108C-IgG1 | 315 | 18 | 317 | 831 |
| LT0.P109C-IgG1 | 315 | 18 | 317 | 832 |
| LT0.K110C-IgG1 | 315 | 18 | 317 | 833 |
| LT0.A111C-IgG1 | 315 | 18 | 317 | 834 |
| LT0.A112C-IgG1 | 315 | 18 | 317 | 835 |
| LT0.P113C-IgG1 | 315 | 18 | 317 | 836 |
| LT0.S114C-IgG1 | 315 | 18 | 317 | 837 |
| LT0.V115C-IgG1 | 315 | 18 | 317 | 838 |
| LT0.T116C-IgG1 | 315 | 18 | 317 | 839 |
| LT0.P120C-IgG1 | 315 | 18 | 317 | 840 |
| LT0.S121C-IgG1 | 315 | 18 | 317 | 841 |
| LT0.S122C-IgG1 | 315 | 18 | 317 | 842 |
| LT0.E123C-IgG1 | 315 | 18 | 317 | 843 |
| LT0.E124C-IgG1 | 315 | 18 | 317 | 844 |
| LT0.L125C-IgG1 | 315 | 18 | 317 | 845 |
| LT0.Q126C-IgG1 | 315 | 18 | 317 | 846 |
| LT0.A127C-IgG1 | 315 | 18 | 317 | 847 |
| LT0.N128C-IgG1 | 315 | 18 | 317 | 848 |
| LT0.K129C-IgG1 | 315 | 18 | 317 | 849 |
| LT0.A130C-IgG1 | 315 | 18 | 317 | 850 |
| LT0.T131C-IgG1 | 315 | 18 | 317 | 851 |
| LT0.I136C-IgG1 | 315 | 18 | 317 | 852 |
| LT0.S137C-IgG1 | 315 | 18 | 317 | 853 |
| LT0.D138C-IgG1 | 315 | 18 | 317 | 854 |
| LT0.F139C-IgG1 | 315 | 18 | 317 | 855 |
| LT0.Y140C-IgG1 | 315 | 18 | 317 | 856 |
| LT0.P141C-IgG1 | 315 | 18 | 317 | 857 |
| LT0.G142C-IgG1 | 315 | 18 | 317 | 858 |
| LT0.A143C-IgG1 | 315 | 18 | 317 | 859 |
| LT0.V144C-IgG1 | 315 | 18 | 317 | 860 |
| LT0.T145C-IgG1 | 315 | 18 | 317 | 861 |
| LT0.V146C-IgG1 | 315 | 18 | 317 | 862 |
| LT0.A147C-IgG1 | 315 | 18 | 317 | 863 |
| LT0.W148C-IgG1 | 315 | 18 | 317 | 864 |
| LT0.K149C-IgG1 | 315 | 18 | 317 | 865 |
| LT0.A150C-IgG1 | 315 | 18 | 317 | 866 |
| LT0.D151C-IgG1 | 315 | 18 | 317 | 867 |
| LT0.S152C-IgG1 | 315 | 18 | 317 | 868 |
| LT0.S153C-IgG1 | 315 | 18 | 317 | 869 |
| LT0.P154C-IgG1 | 315 | 18 | 317 | 870 |
| LT0.V155C-IgG1 | 315 | 18 | 317 | 871 |
| LT0.K156C-IgG1 | 315 | 18 | 317 | 872 |
| LT0.A157C-IgG1 | 315 | 18 | 317 | 873 |
| LT0.G158C-IgG1 | 315 | 18 | 317 | 874 |
| LT0.V159C-IgG1 | 315 | 18 | 317 | 875 |
| LT0.E160C-IgG1 | 315 | 18 | 317 | 876 |
| LT0.T161C-IgG1 | 315 | 18 | 317 | 877 |
| LT0.T162C-IgG1 | 315 | 18 | 317 | 878 |
| LT0.T163C-IgG1 | 315 | 18 | 317 | 879 |
| LT0.P164C-IgG1 | 315 | 18 | 317 | 880 |
| LT0.S165C-IgG1 | 315 | 18 | 317 | 881 |
| LT0.K166C-IgG1 | 315 | 18 | 317 | 882 |
| LT0.Q167C-IgG1 | 315 | 18 | 317 | 883 |
| LT0.S168C-IgG1 | 315 | 18 | 317 | 884 |
| LT0.N170C-IgG1 | 315 | 18 | 317 | 885 |
| LT0.N171C-IgG1 | 315 | 18 | 317 | 886 |
| LT0.K172C-IgG1 | 315 | 18 | 317 | 887 |
| LT0.Y173C-IgG1 | 315 | 18 | 317 | 888 |
| LT0.A174C-IgG1 | 315 | 18 | 317 | 889 |
| LT0.A175C-IgG1 | 315 | 18 | 317 | 890 |
| LT0.S180C-IgG1 | 315 | 18 | 317 | 891 |
| LT0.L181C-IgG1 | 315 | 18 | 317 | 892 |
| LT0.T182C-IgG1 | 315 | 18 | 317 | 893 |
| LT0.P183C-IgG1 | 315 | 18 | 317 | 894 |
| LT0.E184C-IgG1 | 315 | 18 | 317 | 895 |
| LT0.Q185C-IgG1 | 315 | 18 | 317 | 896 |
| LT0.W186C-IgG1 | 315 | 18 | 317 | 897 |
| LT0.K187C-IgG1 | 315 | 18 | 317 | 898 |
| LT0.S188C-IgG1 | 315 | 18 | 317 | 899 |
| LT0.H189C-IgG1 | 315 | 18 | 317 | 900 |
| LT0.R190C-IgG1 | 315 | 18 | 317 | 901 |
| LT0.S191C-IgG1 | 315 | 18 | 317 | 902 |
| LT0.Y192C-IgG1 | 315 | 18 | 317 | 903 |
| LT0.S193C-IgG1 | 315 | 18 | 317 | 904 |
| LT0.Q195C-IgG1 | 315 | 18 | 317 | 905 |
| LT0.V196C-IgG1 | 315 | 18 | 317 | 906 |
| LT0.T197C-IgG1 | 315 | 18 | 317 | 907 |
| LT0.H198C-IgG1 | 315 | 18 | 317 | 908 |
| LT0.E199C-IgG1 | 315 | 18 | 317 | 909 |
| LT0.G200C-IgG1 | 315 | 18 | 317 | 910 |
| LT0.S203C-IgG1 | 315 | 18 | 317 | 911 |
| LT0.T204C-IgG1 | 315 | 18 | 317 | 912 |
| LT0.V205C-IgG1 | 315 | 18 | 317 | 913 |
| LT0.E206C-IgG1 | 315 | 18 | 317 | 914 |
| LT0.K207C-IgG1 | 315 | 18 | 317 | 915 |
| LT0.T208C-IgG1 | 315 | 18 | 317 | 916 |
| LT0.V209C-IgG1 | 315 | 18 | 317 | 917 |
| LT0.A210C-IgG1 | 315 | 18 | 317 | 918 |
| LT0.P211C-IgG1 | 315 | 18 | 317 | 919 |
| LT0.T212C-IgG1 | 315 | 18 | 317 | 920 |
| LT0.E213C-IgG1 | 315 | 18 | 317 | 921 |

### Reference Example 11-2 Assessment of Electrophoretic Mobility in Polyacrylamide Gel of Antibodies Having Cysteine Substitution at Various Positions of the Lambda Chain

[1019] Similarly to Reference Example 8-2, non-reducing SDS-PAGE was carried out with the G7-IgG1 variants produced in Reference Example 11-1, the gel image was captured, and bands were quantified.

[1020] From the obtained gel image, the variants were classified into 7 groups according to the band pattern of each of the G7-IgG1 variants: Single (one band at a molecular weight region similar to that of G7-IgG1), Double (two bands at a molecular weight region similar to that of G7-IgG1), Triple (three bands at a molecular weight region similar to that of G7-IgG1), Several (four or more bands at a molecular weight region similar to that of G7-IgG1), LMW (band(s) at a molecular weight region lower than that of G7-IgG1), HMW (band(s) at a molecular weight region higher than that of G7-IgG1), and Faint (band(s) blurry and difficult to determine). Regarding the G7-IgG1 variants classified as “Double”, one of the two bands showed the same electrophoretic mobility as G7-IgG1 while the other band showed slightly faster or slower mobility. Thus, for the G7-IgG1 variants classified as “Double”, the percentage of the bands showing different mobility to G7-IgG1 (percentage of new band (%)) was also calculated. Grouping of the band patterns for G7-IgG1 light chain variants and the calculation results of the band percentage are shown in Table 54. From Table 54, variants classified into the Double and Triple groups are shown in Table 55. In these variants, it is highly likely that cysteine substitution caused structural changes such as crosslinkage of Fabs, which resulted in the change in electrophoretic mobility. In this Reference Example, the variant in which the amino acid residue at position 107a (Kabat numbering) was substituted with cysteine was not assessed. However, position 107a (Kabat numbering) is a position where the residue structurally exposed to the surface is present in the hinge region. Thus, in this variant also, it is highly likely that cysteine substitution causes structural changes such as crosslinkage of Fabs, and results in the change in electrophoretic mobility.

TABLE 54

| G7-IgG1 light chain | | Percentage of |
|---|---|---|
| variant name | Group | new band (%) |
| G7L.T5C-IgG1 | Single | — |
| G7L.Q6C-IgG1 | Triple | — |
| G7L.P7C-IgG1 | Single | — |
| G7L.P8C-IgG1 | Single | — |
| G7L.S9C-IgG1 | Single | — |
| G7L.A11C-IgG1 | Single | — |
| G7L.S12C-IgG1 | Single | — |
| G7L.G13C-IgG1 | Single | — |
| G7L.T14C-IgG1 | Single | — |
| G7L.P15C-IgG1 | Single | — |
| G7L.G16C-IgG1 | Faint | — |
| G7L.Q17C-IgG1 | Single | — |
| G7L.R18C-IgG1 | Single | — |
| G7L.V19C-IgG1 | Double | 32.3 |
| G7L.T20C-IgG1 | Single | — |
| G7L.I21C-IgG1 | Faint | — |
| G7L.S22C-IgG1 | Single | — |
| G7L.G25C-IgG1 | Single | — |
| G7L.S26C-IgG1 | Single | — |
| G7L.S27C-IgG1 | Single | — |
| G7L.S27aC-IgG1 | Single | — |
| G7L.T32C-IgG1 | Single | — |
| G7L.V33C-IgG1 | Triple | — |
| G7L.N34C-IgG1 | Double | 43.8 |
| G7L.N50C-IgG1 | Single | — |
| G7L.N51C-IgG1 | Single | — |
| G7L.P55C-IgG1 | Single | — |
| G7L.S56C-IgG1 | Single | — |
| G7L.G57C-IgG1 | Single | — |
| G7L.I58C-IgG1 | Single | — |
| G7L.P59C-IgG1 | Single | — |
| G7L.D60C-IgG1 | Single | — |
| G7L.R61C-IgG1 | Single | — |
| G7L.F62C-IgG1 | Faint | — |
| G7L.S63C-IgG1 | Single | — |
| G7L.S65C-IgG1 | Single | — |
| G7L.S67C-IgG1 | Single | — |
| G7L.G68C-IgG1 | Single | — |
| G7L.T69C-IgG1 | Single | — |
| G7L.S70C-IgG1 | Single | — |
| G7L.S72C-IgG1 | Single | — |
| G7L.L73C-IgG1 | Faint | — |
| G7L.V74C-IgG1 | Single | — |
| G7L.I75C-IgG1 | Faint | — |
| G7L.S76C-IgG1 | Single | — |
| G7L.G77C-IgG1 | Single | — |
| G7L.L78C-IgG1 | Faint | — |
| G7L.Q79C-IgG1 | Single | — |
| G7L.R96C-IgG1 | Single | — |
| G7L.V97C-IgG1 | Faint | — |
| G7L.F98C-IgG1 | Single | — |
| G7L.G99C-IgG1 | Faint | — |
| G7L.G100C-IgG1 | Single | — |
| G7L.G101C-IgG1 | Single | — |
| G7L.T102C-IgG1 | Faint | — |
| G7L.K103C-IgG1 | Single | — |
| G7L.L104C-IgG1 | Faint | — |
| G7L.T105C-IgG1 | Single | — |
| G7L.V106C-IgG1 | Faint | — |
| G7L.L106aC-IgG1 | Single | — |
| LT0.Q108C-IgG1 | Double | 10.6 |
| LT0.P109C-IgG1 | Double | 42.9 |
| LT0.K110C-IgG1 | Single | — |
| LT0.A111C-IgG1 | Single | — |
| LT0.A112C-IgG1 | Single | — |
| LT0.P113C-IgG1 | LMW | — |
| LT0.S114C-IgG1 | Single | — |
| LT0.V115C-IgG1 | LMW | — |
| LT0.T116C-IgG1 | Single | — |
| LT0.P120C-IgG1 | LMW | — |
| LT0.S121C-IgG1 | LMW | — |
| LT0.S122C-IgG1 | no data | — |
| LT0.E123C-IgG1 | Double | 57.5 |
| LT0.E124C-IgG1 | LMW | — |
| LT0.L125C-IgG1 | LMW | — |
| LT0.Q126C-IgG1 | Triple | — |
| LT0.A127C-IgG1 | Single | — |
| LT0.N128C-IgG1 | Single | — |
| LT0.K129C-IgG1 | Single | — |
| LT0.A130C-IgG1 | LMW | — |
| LT0.T131C-IgG1 | LMW | — |
| LT0.I136C-IgG1 | LMW | — |
| LT0.S137C-IgG1 | Single | — |
| LT0.D138C-IgG1 | Single | — |
| LT0.F139C-IgG1 | LMW | — |
| LT0.Y140C-IgG1 | Single | — |
| LT0.P141C-IgG1 | Single | — |
| LT0.G142C-IgG1 | Single | — |
| LT0.A143C-IgG1 | Single | — |
| LT0.V144C-IgG1 | LMW | — |
| LT0.T145C-IgG1 | Single | — |
| LT0.V146C-IgG1 | LMW | — |
| LT0.A147C-IgG1 | Single | — |
| LT0.W148C-IgG1 | no data | — |
| LT0.K149C-IgG1 | Single | — |
| LT0.A150C-IgG1 | Single | — |
| LT0.D151C-IgG1 | Single | — |
| LT0.S152C-IgG1 | Single | — |
| LT0.S153C-IgG1 | Single | — |
| LT0.P154C-IgG1 | Single | — |
| LT0.V155C-IgG1 | Single | — |
| LT0.K156C-IgG1 | Single | — |
| LT0.A157C-IgG1 | Single | — |
| LT0.G158C-IgG1 | no data | — |
| LT0.V159C-IgG1 | Single | — |
| LT0.E160C-IgG1 | Single | — |
| LT0.T161C-IgG1 | Single | — |
| LT0.T162C-IgG1 | Single | — |
| LT0.T163C-IgG1 | Single | — |
| LT0.P164C-IgG1 | Single | — |
| LT0.S165C-IgG1 | Single | — |
| LT0.K166C-IgG1 | Single | — |
| LT0.Q167C-IgG1 | Single | — |
| LT0.S168C-IgG1 | Single | — |
| LT0.N170C-IgG1 | Single | — |
| LT0.N171C-IgG1 | Single | — |
| LT0.K172C-IgG1 | Single | — |
| LT0.Y173C-IgG1 | Single | — |
| LT0.A174C-IgG1 | LMW | — |
| LT0.A175C-IgG1 | LMW | — |
| LT0.S180C-IgG1 | Single | — |
| LT0.L181C-IgG1 | Single | — |
| LT0.T182C-IgG1 | Single | — |
| LT0.P183C-IgG1 | LMW | — |
| LT0.E184C-IgG1 | Single | — |
| LT0.Q185C-IgG1 | Single | — |
| LT0.W186C-IgG1 | LMW | — |
| LT0.K187C-IgG1 | LMW | — |
| LT0.S188C-IgG1 | LMW | — |
| LT0.H189C-IgG1 | LMW | — |
| LT0.R190C-IgG1 | LMW | — |
| LT0.S191C-IgG1 | Single | — |
| LT0.Y192C-IgG1 | Single | — |
| LT0.S193C-IgG1 | Single | — |
| LT0.Q195C-IgG1 | Double | 30.1 |
| LT0.V196C-IgG1 | Double | 82.9 |
| LT0.T197C-IgG1 | Single | — |
| LT0.H198C-IgG1 | Faint | — |
| LT0.E199C-IgG1 | Single | — |
| LT0.G200C-IgG1 | Double | 15.5 |
| LT0.S203C-IgG1 | Double | 32.4 |
| LT0.T204C-IgG1 | Single | — |
| LT0.V205C-IgG1 | Single | — |
| LT0.E206C-IgG1 | Single | — |
| LT0.K207C-IgG1 | Single | — |
| LT0.T208C-IgG1 | Single | — |
| LT0.V209C-IgG1 | LMW | — |
| LT0.A210C-IgG1 | LMW | — |
| LT0.P211C-IgG1 | Faint | — |
| LT0.T212C-IgG1 | LMW | — |
| LT0.E213C-IgG1 | Single | — |

TABLE 55

| G7-IgG1 light chain | | Percentage of |
|---|---|---|
| variant name | Group | new band (%) |
| G7L.Q6C-IgG1 | Triple | — |
| G7L.V19C-IgG1 | Double | 32.3 |
| G7L.V33C-IgG1 | Triple | — |
| G7L.N34C-IgG1 | Double | 43.8 |
| LT0.Q108C-IgG1 | Double | 10.6 |
| LT0.P109C-IgG1 | Double | 42.9 |
| LT0.E123C-IgG1 | Double | 57.5 |
| LT0.Q126C-IgG1 | Triple | — |
| LT0.Q195C-IgG1 | Double | 30.1 |
| LT0.V196C-IgG1 | Double | 82.9 |
| LT0.G200C-IgG1 | Double | 15.5 |
| LT0.S203C-IgG1 | Double | 32.4 |

### Reference Example 12 Assessment of Antibodies Having Cysteine Substitution at Various Positions of VHH

### Reference Example 12-1 Production of Antibodies Having Cysteine Substitution at Various Positions of VHH

[1021] An anti-human IL6R neutralizing VHH, IL6R90 (SEQ ID NO: 319) was fused with a human IgG1 Fc region (G1T3dCH1dC, SEQ ID NO: 320) to produce IL6R90-Fc (IL6R90-G1T3dCH1dC, SEQ ID NO: 321), and this was subjected to a study in which an arbitrary amino acid residue among the IL6R90 region structurally exposed to the surface was substituted with cysteine. Amino acid residues within the IL6R90 region were substituted with cysteine, and expression vectors encoding the genes of IL6R90-Fc VHH region variants shown in Table 56 were produced by a method known to the person skilled in the art. These variants of the IL6R90-Fc VHH region were each linked with the Fc region of human IgG1 (G1T3dCH1dC, SEQ ID NO: 320) to produce IL6R90-Fc variants, and expression vectors encoding the corresponding genes were produced by a method known to the person skilled in the art.

TABLE 56

| | Position of cysteine | |
|---|---|---|
| Variant of IL6R90-Fc | substitution | SEQ |
| VHH region | (Kabat numbering) | ID NO: |
| IL6R90.E1C | 1 | 922 |
| IL6R90.V2C | 2 | 923 |
| IL6R90.Q3C | 3 | 924 |
| IL6R90.LAC | 4 | 925 |
| IL6R90.V5C | 5 | 926 |
| IL6R90.E6C | 6 | 927 |
| IL6R90.S7C | 7 | 928 |
| IL6R90.G8C | 8 | 929 |
| IL6R90.G9C | 9 | 930 |
| IL6R90.G10C | 10 | 931 |
| IL6R90.L11C | 11 | 932 |
| IL6R90.V12C | 12 | 933 |
| IL6R90.Q13C | 13 | 934 |
| IL6R90.P14C | 14 | 935 |
| IL6R90.G15C | 15 | 936 |
| IL6R90.G16C | 16 | 937 |
| IL6R90.S17C | 17 | 938 |
| IL6R90.L18C | 18 | 939 |
| IL6R90.R19C | 19 | 940 |
| IL6R90.L20C | 20 | 941 |
| IL6R90.S21C | 21 | 942 |
| IL6R90.A23C | 23 | 943 |
| IL6R90.A24C | 24 | 944 |
| IL6R90.S25C | 25 | 945 |
| IL6R90.G26C | 26 | 946 |
| IL6R90.F27C | 27 | 947 |
| IL6R90.T28C | 28 | 948 |
| IL6R90.F29C | 29 | 949 |
| IL6R90.D30C | 30 | 950 |
| IL6R90.W36C | 36 | 951 |
| IL6R90.V37C | 37 | 952 |
| IL6R90.R38C | 38 | 953 |
| IL6R90.Q39C | 39 | 954 |
| IL6R90.A40C | 40 | 955 |
| IL6R90.P41C | 41 | 956 |
| IL6R90.G42C | 42 | 957 |
| IL6R90.K43C | 43 | 958 |
| IL6R90.A44C | 44 | 959 |
| IL6R90.L45C | 45 | 960 |
| IL6R90.E46C | 46 | 961 |
| IL6R90.W47C | 47 | 962 |
| IL6R90.V48C | 48 | 963 |
| IL6R90.S49C | 49 | 964 |
| IL6R90.R66C | 66 | 965 |
| IL6R90.F67C | 67 | 966 |
| IL6R90.T68C | 68 | 967 |
| IL6R90.I69C | 69 | 968 |
| IL6R90.S70C | 70 | 969 |
| IL6R90.R71C | 71 | 970 |
| IL6R90.D72C | 72 | 971 |
| IL6R90.N73C | 73 | 972 |
| IL6R90.A74C | 74 | 973 |
| IL6R90.K75C | 75 | 974 |
| IL6R90.N76C | 76 | 975 |
| IL6R90.T77C | 77 | 976 |
| IL6R90.L78C | 78 | 977 |
| IL6R90.Y79C | 79 | 978 |
| IL6R90.L80C | 80 | 979 |
| IL6R90.Q81C | 81 | 980 |
| IL6R90.M82C | 82 | 981 |
| IL6R90.N82aC | 82a | 982 |
| IL6R90.S82bC | 82b | 983 |
| IL6R90.L82cC | 82c | 984 |
| IL6R90.R83C | 83 | 985 |
| IL6R90.P84C | 84 | 986 |
| IL6R90.E85C | 85 | 987 |
| IL6R90.D86C | 86 | 988 |
| IL6R90.T87C | 87 | 989 |
| IL6R90.A88C | 88 | 990 |
| IL6R90.V89C | 89 | 991 |
| IL6R90.Y90C | 90 | 992 |
| IL6R90.Y91C | 91 | 993 |
| IL6R90.V93C | 93 | 994 |
| IL6R90.K94C | 94 | 995 |
| IL6R90.W103C | 103 | 996 |
| IL6R90.G104C | 104 | 997 |
| IL6R90.Q105C | 105 | 998 |
| IL6R90.G106C | 106 | 999 |
| IL6R90.T107C | 107 | 1000 |
| IL6R90.L108C | 108 | 1001 |
| IL6R90.V109C | 109 | 1002 |
| IL6R90.T110C | 110 | 1003 |
| IL6R90.V111C | 111 | 1004 |
| IL6R90.S112C | 112 | 1005 |
| IL6R90.S113C | 113 | 1006 |

[1022] IL6R90-Fc variants produced above and shown in Table 57 were expressed by transient expression using FreeStyle293 cells (Invitrogen) or Expi293 cells (Life technologies) by a method known to the person skilled in the art, and purified with Protein A by a method known to the person skilled in the art.

TABLE 57

| | VHH | Fc |
|---|---|---|
| | region | region |
| IL6R90-Fc | SEQ | SEQ |
| variant name | ID NO: | ID NO: |
| IL6R90.E1C-Fc | 922 | 320 |
| IL6R90.V2C-Fc | 923 | 320 |
| IL6R90.Q3C-Fc | 924 | 320 |
| IL6R90.L4C-Fc | 925 | 320 |
| IL6R90.V5C-Fc | 926 | 320 |
| IL6R90.E6C-Fc | 927 | 320 |
| IL6R90.S7C-Fc | 928 | 320 |
| IL6R90.G8C-Fc | 929 | 320 |
| IL6R90.G9C-Fc | 930 | 320 |
| IL6R90.G10C-Fc | 931 | 320 |
| IL6R90.L11C-Fc | 932 | 320 |
| IL6R90.V12C-Fc | 933 | 320 |
| IL6R90.Q13C-Fc | 934 | 320 |
| IL6R90.P14C-Fc | 935 | 320 |
| IL6R90.G15C-Fc | 936 | 320 |
| IL6R90.G16C-Fc | 937 | 320 |
| IL6R90.S17C-Fc | 938 | 320 |
| IL6R90.L18C-Fc | 939 | 320 |
| IL6R90.R19C-Fc | 940 | 320 |
| IL6R90.L20C-Fc | 941 | 320 |
| IL6R90.S21C-Fc | 942 | 320 |
| IL6R90.A23C-Fc | 943 | 320 |
| IL6R90.A24C-Fc | 944 | 320 |
| IL6R90.S25C-Fc | 945 | 320 |
| IL6R90.G26C-Fc | 946 | 320 |
| IL6R90.F27C-Fc | 947 | 320 |
| IL6R90.T28C-Fc | 948 | 320 |
| IL6R90.F29C-Fc | 949 | 320 |
| IL6R90.D30C-Fc | 950 | 320 |
| IL6R90.W36C-Fc | 951 | 320 |
| IL6R90.V37C-Fc | 952 | 320 |
| IL6R90.R38C-Fc | 953 | 320 |
| IL6R90.Q39C-Fc | 954 | 320 |
| IL6R90.A40C-Fc | 955 | 320 |
| IL6R90.P41C-Fc | 956 | 320 |
| IL6R90.G42C-Fc | 957 | 320 |
| IL6R90.K43C-Fc | 958 | 320 |
| IL6R90.A44C-Fc | 959 | 320 |
| IL6R90.L45C-Fc | 960 | 320 |
| IL6R90.E46C-Fc | 961 | 320 |
| IL6R90.W47C-Fc | 962 | 320 |
| IL6R90.V48C-Fc | 963 | 320 |
| IL6R90.S49C-Fc | 964 | 320 |
| IL6R90.R66C-Fc | 965 | 320 |
| IL6R90.F67C-Fc | 966 | 320 |
| IL6R90.T68C-Fc | 967 | 320 |
| IL6R90.I69C-Fc | 968 | 320 |
| IL6R90.S70C-Fc | 969 | 320 |
| IL6R90.R71C-Fc | 970 | 320 |
| IL6R90.D72C-Fc | 971 | 320 |
| IL6R90.N73C-Fc | 972 | 320 |
| IL6R90.A74C-Fc | 973 | 320 |
| IL6R90.K75C-Fc | 974 | 320 |
| IL6R90.N76C-Fc | 975 | 320 |
| IL6R90.T77C-Fc | 976 | 320 |
| IL6R90.L78C-Fc | 977 | 320 |
| IL6R90.Y79C-Fc | 978 | 320 |
| IL6R90.L80C-Fc | 979 | 320 |
| IL6R90.Q81C-Fc | 980 | 320 |
| IL6R90.M82C-Fc | 981 | 320 |
| IL6R90.N82aC-Fc | 982 | 320 |
| IL6R90.S82bC-Fc | 983 | 320 |
| IL6R90.L82cC-Fc | 984 | 320 |
| IL6R90.R83C-Fc | 985 | 320 |
| IL6R90.P84C-Fc | 986 | 320 |
| IL6R90.E85C-Fc | 987 | 320 |
| IL6R90.D86C-Fc | 988 | 320 |
| IL6R90.T87C-Fc | 989 | 320 |
| IL6R90.A88C-Fc | 990 | 320 |
| IL6R90.V89C-Fc | 991 | 320 |
| IL6R90.Y90C-Fc | 992 | 320 |
| IL6R90.Y91C-Fc | 993 | 320 |
| IL6R90.V93C-Fc | 994 | 320 |
| IL6R90.K94C-Fc | 995 | 320 |
| IL6R90.W103C-Fc | 996 | 320 |
| IL6R90.G104C-Fc | 997 | 320 |
| IL6R90.Q105C-Fc | 998 | 320 |
| IL6R90.G106C-Fc | 999 | 320 |
| IL6R90.T107C-Fc | 1000 | 320 |
| IL6R90.L108C-Fc | 1001 | 320 |
| IL6R90.V109C-Fc | 1002 | 320 |
| IL6R90.T110C-Fc | 1003 | 320 |
| IL6R90.V111C-Fc | 1004 | 320 |
| IL6R90.S112C-Fc | 1005 | 320 |
| IL6R90.S113C-Fc | 1006 | 320 |

### Reference Example 12-2 Assessment of Electrophoretic Mobility in Polyacrylamide Gel of Antibodies Having Cysteine Substitution at Various Positions of VHH

[1023] It was examined with non-reducing SDS-PAGE whether the IL6R90-Fc variants produced in Reference Example 12-1 show a different electrophoretic mobility to IL6R90-Fc. Sample Buffer Solution (2ME-) (×4) (Wako; 198-13282) was used for preparing electrophoresis samples, the samples were treated for 10 minutes under the condition of specimen concentration 50 microgram/mL and 70 degrees C., and then subjected to non-reducing SDS-PAGE. Mini-PROTEAN TGX Precast gel 4-20% 15 well (BIORAD; 456-1096) was used for non-reducing SDS-PAGE and electrophoresis was carried out at 200 V for 2.5 hours. Then, the gel was stained with CBB stain, the gel image was captured with ChemiDocTouchMP (BIORAD), and the bands were quantified with Image Lab (BIORAD).

[1024] From the obtained gel image, the variants were classified into 7 groups according to the band pattern of each of the IL6R90-Fc variants: Single (one band at a molecular weight region similar to that of IL6R90-Fc), Double (two bands at a molecular weight region similar to that of IL6R90-Fc), Triple (three bands at a molecular weight region similar to that of IL6R90-Fc), Several (four or more bands at a molecular weight region similar to that of IL6R90-Fc), LMW (band(s) at a molecular weight region lower than that of IL6R90-Fc), HMW (band(s) at a molecular weight region higher than that of IL6R90-Fc), and Faint (band(s) blurry and difficult to determine). Regarding the IL6R90-Fc variants classified as “Double”, one of the two bands showed the same electrophoretic mobility as IL6R90-Fc while the other band showed slightly faster or slower mobility. Thus, for the IL6R90-Fc variants classified as “Double”, the percentage of the bands showing different electrophoretic mobility to IL6R90-Fc (percentage of new band (%)) was also calculated. Grouping of the band patterns for IL6R90-Fc variants and the calculation results of the band percentage are shown in Table 58. From Table 58, variants classified into the Double and Triple groups are shown in Table 59. In these variants, it is highly likely that cysteine substitution caused structural changes such as crosslinkage of VHHs, which resulted in the change in electrophoretic mobility.

TABLE 58

| IL6R90-Fc | | Percentage of |
|---|---|---|
| variant name | Group | new band (%) |
| IL6R90.E1C-Fc | Single | — |
| IL6R90.V2C-Fc | Single | — |
| IL6R90.Q3C-Fc | Single | — |
| IL6R90.L4C-Fc | Triple | — |
| IL6R90.V5C-Fc | Single | — |
| IL6R90.E6C-Fc | Double | 65.2 |
| IL6R90.S7C-Fc | Double | 16.4 |
| IL6R90.G8C-Fc | Double | 38.4 |
| IL6R90.G9C-Fc | Double | 71.8 |
| IL6R90.G10C-Fc | Double | 9.7 |
| IL6R90.L11C-Fc | Double | 59.8 |
| IL6R90.V12C-Fc | Double | 24.8 |
| IL6R90.Q13C-Fc | no data | — |
| IL6R90.P14C-Fc | Double | 16.8 |
| IL6R90.G15C-Fc | Double | 18.6 |
| IL6R90.G16C-Fc | Single | — |
| IL6R90.S17C-Fc | Double | 16.6 |
| IL6R90.L18C-Fc | Single | — |
| IL6R90.R19C-Fc | Single | — |
| IL6R90.L20C-Fc | Double | 57.4 |
| IL6R90.S21C-Fc | Single | — |
| IL6R90.A23C-Fc | Single | — |
| IL6R90.A24C-Fc | Double | 59.3 |
| IL6R90.S25C-Fc | Single | — |
| IL6R90.G26C-Fc | Single | — |
| IL6R90.F27C-Fc | Double | 61.5 |
| IL6R90.T28C-Fc | Single | — |
| IL6R90.F29C-Fc | Double | 56.7 |
| IL6R90.D30C-Fc | Single | — |
| IL6R90.W36C-Fc | no data | — |
| IL6R90.V37C-Fc | Single | — |
| IL6R90.R38C-Fc | Double | 64.5 |
| IL6R90.Q39C-Fc | Double | 12.9 |
| IL6R90.A40C-Fc | Double | 3.2 |
| IL6R90.P41C-Fc | Double | 15.9 |
| IL6R90.G42C-Fc | HMW | — |
| IL6R90.K43C-Fc | Double | 9.2 |
| IL6R90.A44C-Fc | Double | 17.9 |
| IL6R90.L45C-Fc | Double | 15.4 |
| IL6R90.E46C-Fc | Double | 16.4 |
| IL6R90.W47C-Fc | Double | 12.6 |
| IL6R90.V48C-Fc | Double | 14.7 |
| IL6R90.S49C-Fc | Double | 54.1 |
| IL6R90.R66C-Fc | Single | — |
| IL6R90.F67C-Fc | Double | 34.8 |
| IL6R90.T68C-Fc | Single | — |
| IL6R90.I69C-Fc | Double | 57.5 |
| IL6R90.S70C-Fc | Single | — |
| IL6R90.R71C-Fc | Double | 34.3 |
| IL6R90.D72C-Fc | Single | — |
| IL6R90.N73C-Fc | Single | — |
| IL6R90.A74C-Fc | Single | — |
| IL6R90.K75C-Fc | Single | — |
| IL6R90.N76C-Fc | Single | — |
| IL6R90.T77C-Fc | Single | — |
| IL6R90.L78C-Fc | Double | 40.6 |
| IL6R90.Y79C-Fc | Single | — |
| IL6R90.L80C-Fc | Double | 54.7 |
| IL6R90.Q81C-Fc | Single | — |
| IL6R90.M82C-Fc | Double | 47.7 |
| IL6R90.N82aC-Fc | Single | — |
| IL6R90.S82bC-Fc | HMW | — |
| IL6R90.L82cC-Fc | Double | 73.2 |
| IL6R90.R83C-Fc | Single | — |
| IL6R90.P84C-Fc | Single | — |
| IL6R90.E85C-Fc | Double | 9.4 |
| IL6R90.D86C-Fc | no data | — |
| IL6R90.T87C-Fc | Single | — |
| IL6R90.A88C-Fc | Double | 66.5 |
| IL6R90.V89C-Fc | LMW | — |
| IL6R90.Y90C-Fc | no data | — |
| IL6R90.Y91C-Fc | Triple | — |
| IL6R90.V93C-Fc | Triple | — |
| IL6R90.K94C-Fc | Double | 37.7 |
| IL6R90.W103C-Fc | Single | — |
| IL6R90.G104C-Fc | no data | — |
| IL6R90.Q105C-Fc | Single | — |
| IL6R90.G106C-Fc | no data | — |
| IL6R90.T107C-Fc | Double | 53.6 |
| IL6R90.L108C-Fc | Single | — |
| IL6R90.V109C-Fc | Faint | — |
| IL6R90.T110C-Fc | Single | — |
| IL6R90.V111C-Fc | Single | — |
| IL6R90.S112C-Fc | Single | — |
| IL6R90.S113C-Fc | Single | — |

TABLE 59

| IL6R90-Fc | | Percentage of |
|---|---|---|
| variant name | Group | new band (%) |
| IL6R90.L4C-Fc | Triple | — |
| IL6R90.E6C-Fc | Double | 65.2 |
| IL6R90.S7C-Fc | Double | 16.4 |
| IL6R90.G8C-Fc | Double | 38.4 |
| IL6R90.G9C-Fc | Double | 71.8 |
| IL6R90.G10C-Fc | Double | 9.7 |
| IL6R90.L11C-Fc | Double | 59.8 |
| IL6R90.V12C-Fc | Double | 24.8 |
| IL6R90.P14C-Fc | Double | 16.8 |
| IL6R90.G15C-Fc | Double | 18.6 |
| IL6R90.S17C-Fc | Double | 16.6 |
| IL6R90.L20C-Fc | Double | 57.4 |
| IL6R90.A24C-Fc | Double | 59.3 |
| IL6R90.F27C-Fc | Double | 61.5 |
| IL6R90.F29C-Fc | Double | 56.7 |
| IL6R90.R38C-Fc | Double | 64.5 |
| IL6R90.Q39C-Fc | Double | 12.9 |
| IL6R90.A40C-Fc | Double | 3.2 |
| IL6R90.P41C-Fc | Double | 15.9 |
| IL6R90.K43C-Fc | Double | 9.2 |
| IL6R90.A44C-Fc | Double | 17.9 |
| IL6R90.L45C-Fc | Double | 15.4 |
| IL6R90.E46C-Fc | Double | 16.4 |
| IL6R90.W47C-Fc | Double | 12.6 |
| IL6R90.V48C-Fc | Double | 14.7 |
| IL6R90.S49C-Fc | Double | 54.1 |
| IL6R90.F67C-Fc | Double | 34.8 |
| IL6R90.I69C-Fc | Double | 57.5 |
| IL6R90.R71C-Fc | Double | 34.3 |
| IL6R90.L78C-Fc | Double | 40.6 |
| IL6R90.L80C-Fc | Double | 54.7 |
| IL6R90.M82C-Fc | Double | 47.7 |
| IL6R90.L82cC-Fc | Double | 73.2 |
| IL6R90.E85C-Fc | Double | 9.4 |
| IL6R90.A88C-Fc | Double | 66.5 |
| IL6R90.Y91C-Fc | Triple | — |
| IL6R90.V93C-Fc | Triple | — |
| IL6R90.K94C-Fc | Double | 37.7 |
| IL6R90.T107C-Fc | Double | 53.6 |

### Reference Example 13 Assessment of CD3 Agonist Activity of Antibodies Having Cysteine Substitution within the Fab

### Reference Example 13-1 Production of Antibodies Having Cysteine Substitution at the Constant Region

[1025] An anti-human CD3 agonist antibody, OKT3 (heavy chain: OKT3VH0000-G1T4 (SEQ ID NO: 1007), light chain: OKT3VL0000-KT0 (SEQ ID NO: 1008)), was subjected to a study in which an arbitrary amino acid residue structurally exposed to the surface was substituted with cysteine.

[1026] Amino acid residues within the OKT3 heavy chain constant region (G1T4, SEQ ID NO: 1009) were substituted with cysteine to produce variants of the OKT3 heavy chain constant region shown in Table 60. These variants of the OKT3 heavy chain constant region were each linked with the OKT3 heavy chain variable region (OKT3VH0000, SEQ ID NO: 1010) to produce OKT3 heavy chain variants, and expression vectors encoding the corresponding genes were produced by a method known to the person skilled in the art.

TABLE 60

| Variant of OKT3 | Position of cysteine | |
|---|---|---|
| heavy chain | substitution | SEQ |
| constant region | (EU numbering) | ID NO: |
| G1T4.T135C | 135 | 1017 |
| G1T4.S136C | 136 | 1018 |
| G1T4.S191C | 191 | 1019 |

[1027] Similarly, an amino acid residue within the OKT3 light chain constant region (KT0, SEQ ID NO: 1011) was substituted with cysteine to produce a variant of the OKT3 light chain constant region shown in Table 61. This variant of the OKT3 light chain constant region was linked with the OKT3 light chain variable region (OKT3VL0000, SEQ ID NO: 1012) to produce an OKT3 light chain variant, and an expression vector encoding the corresponding gene was produced by a method known to the person skilled in the art.

TABLE 61

| Variant of OKT3 | Position of cysteine | |
|---|---|---|
| light chain | substitution | SEQ |
| constant region | (Kabat numbering) | ID NO: |
| KT0.K126C | 126 | 1020 |

[1028] The above-produced OKT3 heavy chain variants and OKT3 light chain variant were each combined with the OKT3 light chain and OKT3 heavy chain, and the OKT3 variants shown in Table 62 were expressed by transient expression using FreeStyle293 cells (Invitrogen) or Expi293 cells (Life technologies) by a method known to the person skilled in the art, and purified with Protein A by a method known to the person skilled in the art. Further, an anti-KLH antibody, IC17 ((heavy chain: IC17HdK-G1T4 (SEQ ID NO: 1013), light chain: IC17L-k0 (SEQ ID NO: 1014)) was similarly prepared as a negative control.

TABLE 62

| | Heavy | Heavy | Light | Light |
|---|---|---|---|---|
| | chain | chain | chain | chain |
| | variable | constant | variable | constant |
| | region | region | region | region |
| Antibody | SEQ | SEQ | SEQ | SEQ |
| name | ID NO: | ID NO: | ID NO: | ID NO: |
| H_T135C | 1010 | 1017 | 1012 | 1011 |
| H_S136C | 1010 | 1018 | 1012 | 1011 |
| H_S191C | 1010 | 1019 | 1012 | 1011 |
| L_K126C | 1010 | 1009 | 1012 | 1020 |

### Reference Example 13-2 Preparation of Jurkat Cell Suspension

[1029] Jurkat cells (TCR/CD3 Effector Cells (NFAT), Promega) were collected from flasks. The cells were washed with Assay Buffer (RPMI 1640 medium (Gibco), 10% FBS (HyClone), 1% MEM Non Essential Amino Acids (Invitrogen), and 1 mM Sodium Pyruvate (Invitrogen)), and then suspended at 3×10⁶ cells/mL in Assay Buffer. This suspension of Jurkat cells was subjected to subsequent experiments.

### Reference Example 13-3 Preparation of Luminescence Reagent Solution

[1030] 100 mL of Bio-Glo Luciferase Assay Buffer (Promega) was added to the bottle of Bio-Glo Luciferase Assay Substrate (Promega), and mixed by inversion. The bottle was protected from light and frozen at −20 degrees C. This luminescence reagent solution was subjected to subsequent experiments.

### Reference Example 13-4 Assessment of T Cell Activation of Antibodies Having Cysteine Substitution at the Constant Region

[1031] T cell activation by agonist signaling was assessed based on the fold change of luciferase luminescence. The aforementioned Jurkat cells are cells transformed with a luciferase reporter gene having an NFAT responsive sequence. When the cells are stimulated by an anti-TCR/CD3 antibody, the NFAT pathway is activated via intracellular signaling, thereby inducing luciferase expression. The Jurkat cell suspension prepared as described above was added to a 384-well flat-bottomed white plate at 10 microliter per well (3×10⁴ cells/well). Next, the antibody solution prepared at each concentration (10,000, 1,000, 100, 10, 1, and 0.1 ng/mL) was added at 20 microliter per well. This plate was allowed to stand in a 5% CO₂ incubator at 37 degrees C. for 24 hours. After the incubation, the luminescence reagent solution was thawed, and 30 microliter of the solution was added to each well. The plate was then allowed to stand at room temperature for 10 minutes. Luciferase luminescence in each well of the plate was measured using a luminometer. The amount of luminescence (fold) was determined by dividing the amount of luminescence in the wells added with the antibody with the amount of luminescence in the wells lacking the antibody.

[1032] As a result, among the OKT3 variants having cysteine substitution at the constant region, multiple variants greatly increased the T cell activated state as compared to OKT3 as shown in FIG. 46. This result shows that there are multiple cysteine modifications that can crosslink Fabs and enhance CD3 agonist activities.

### Reference Example 14 Assessment of CD3 Agonist Activity of Antibodies Having Different Cysteine Substitutions in the Two Fabs

### Reference Example 14-1 Production of Antibodies Having Heterologous Cysteine Substitution at the Constant Region

[1033] An anti-human CD3 agonist antibody, OKT3 (heavy chain: OKT3VH0000-G1T4 (SEQ ID NO: 1007), light chain: OKT3VL0000-KT0 (SEQ ID NO: 1008)), was subjected to a study in which an arbitrary amino acid residue structurally exposed to the surface was substituted with cysteine.

[1034] An amino acid residue within the OKT3 heavy chain constant region 1 (G1T4k, SEQ ID NO: 1015) was substituted with cysteine to produce a variant of the OKT3 heavy chain constant region shown in Table 63. This variant of the OKT3 heavy chain constant region was linked with the OKT3 heavy chain variable region (OKT3VH0000, SEQ ID NO: 1010) to produce OKT3 heavy chain variant 1, and an expression vector encoding the corresponding gene was produced by a method known to the person skilled in the art. Similarly, amino acid residues within the OKT3 heavy chain constant region 2 (G1T4h, SEQ ID NO: 1016) were substituted with cysteine to produce variants of the OKT3 heavy chain constant region shown in Table 64. These variants of the OKT3 heavy chain constant region were each linked with the OKT3 heavy chain variable region (OKT3VH0000, SEQ ID NO: 1010) to produce OKT3 heavy chain variant 2, and expression vectors encoding the corresponding genes were produced by a method known to the person skilled in the art. It is noted that heavy-chain constant regions 1 and 2 in this Reference Example are introduced with the Knobs-into-Holes (KiH) modification at the CH3 region for promoting heterodimerization.

TABLE 63

| Variant of OKT3 | Position of cysteine | |
|---|---|---|
| heavy chain | substitution | SEQ |
| constant region 1 | (EU numbering) | ID NO: |
| G1T4k.S191C | 191 | 1022 |

TABLE 64

| Variant of | Position of cysteine | |
|---|---|---|
| OKT3 heavy chain | substitution | SEQ |
| constant region 2 | (EU numbering) | ID NO: |
| G1T4h.V188C | 188 | 1023 |
| G1T4h.P189C | 189 | 1024 |
| G1T4h.S190C | 190 | 1025 |
| G1T4h.S191C | 191 | 1026 |
| G1T4h.S192C | 192 | 1027 |
| G1T4h.L193C | 193 | 1028 |
| G1T4h.G194C | 194 | 1029 |

[1035] The above-produced OKT3 heavy chain variant 1 and OKT3 heavy chain variant 2 were combined with the OKT3 light chain, and the OKT3 variants shown in Table 65 were expressed by transient expression using FreeStyle293 cells (Invitrogen) or Expi293 cells (Life technologies) by a method known to the person skilled in the art, and purified with Protein A by a method known to the person skilled in the art. Further, an anti-KLH antibody, IC17 (heavy chain: IC17HdK-G1T4 (SEQ ID NO: 1013), light chain: IC17L-k0 (SEQ ID NO: 1014)) was similarly prepared as a negative control.

TABLE 65

| | Heavy chain variant 1 | | Heavy chain variant 2 | | | |
|---|---|---|---|---|---|---|
| | Heavy | Heavy | Heavy | Heavy | Light | Light |
| | chain | chain | chain | chain | chain | chain |
| | variable | constant | variable | constant | variable | constant |
| | region | region | region | region | region | region |
| | SEQ ID | SEQ ID | SEQ ID | SEQ ID | SEQ ID | SEQ ID |
| Antibody name | NO: | NO: | NO: | NO: | NO: | NO: |
| OKT3_KiH | 1010 | 1015 | 1010 | 1016 | 1012 | 1011 |
| H_S191C_KiH | 1010 | 1022 | 1010 | 1026 | 1012 | 1011 |
| H_S191C/V188C_KiH | 1010 | 1022 | 1010 | 1023 | 1012 | 1011 |
| H_S191C/P189C_KiH | 1010 | 1022 | 1010 | 1024 | 1012 | 1011 |
| H_S191C/S190C_KiH | 1010 | 1022 | 1010 | 1025 | 1012 | 1011 |
| H_S191C/S192C_KiH | 1010 | 1022 | 1010 | 1027 | 1012 | 1011 |
| H_S191C/L193C_KiH | 1010 | 1022 | 1010 | 1028 | 1012 | 1011 |
| H_S191C/G194C_KiH | 1010 | 1022 | 1010 | 1029 | 1012 | 1011 |

### Reference Example 14-2 Preparation of Jurkat Cell Suspension

[1036] Jurkat cell suspension was prepared as in Reference Example 13-2.

### Reference Example 14-3 Preparation of Luminescence Reagent Solution

[1037] Luminescence reagent solution was prepared as in Reference Example 13-3.

### Reference Example 14-4 Assessment of T Cell Activation of Antibodies Having Heterologous Cysteine Substitution at the Constant Region

[1038] T cell activation was assessed as in Reference Example 13-4.

[1039] As a result, OKT3 variants having different cysteine substitutions at the two constant regions of the antibody greatly increased the T cell activated state as compared to OKT3, as shown in FIG. 47. This result shows that even different cysteine substitutions between the Fabs can crosslink Fabs and enhance CD3 agonist activities.

### Reference Example 15 Assessment of CD3 Agonist Activity of Antibodies Having Charge Modification within the Fab

### Reference Example 15-1 Production of Antibodies Having Charged Amino Acid Substitution at the Constant Region

[1040] The heavy chain of an anti-human CD3 agonist antibody, OKT3 (heavy chain: OKT3VH0000-G1T4 (SEQ ID NO: 1007), light chain: OKT3VL0000-KT0 (SEQ ID NO: 1008)), was subjected to a study in which an arbitrary amino acid residue structurally exposed to the surface was substituted with charged amino acid.

[1041] Amino acid residues within the OKT3 heavy chain constant region 1 (G1T4k, SEQ ID NO: 1015) were substituted with arginine (R) or lysine (K) to produce a variant of the OKT3 heavy chain constant region shown in Table 66. This variant of the OKT3 heavy chain constant region was linked with the OKT3 heavy chain variable region (OKT3VH0000, SEQ ID NO: 1010) to produce OKT3 heavy chain variant 1, and an expression vector encoding the corresponding gene was produced by a method known to the person skilled in the art. Similarly, amino acid residues within the OKT3 heavy chain constant region 2 (G1T4h, SEQ ID NO: 1016) were substituted with aspartic acid (D) or glutamic acid (E) to produce variants of the OKT3 heavy chain constant region shown in Table 67. These variants of the OKT3 heavy chain constant region were each linked with the OKT3 heavy chain variable region (OKT3VH0000, SEQ ID NO: 1010) to produce OKT3 heavy chain variant 2, and expression vectors encoding the corresponding genes were produced by a method known to the person skilled in the art. It is noted that the CH3 regions of heavy chain constant regions 1 and 2 in this Reference Example are introduced with the Knobs-into-Holes (KiH) modification for promoting heterodimerization.

TABLE 66

| Variant of | Amino acid | |
|---|---|---|
| OKT3 heavy chain | modification | SEQ |
| constant region 1 | (EU numbering) | ID NO: |
| G1T4k0004 | S134R/T135R/S136R/G137R/S191R/ | 1030 |
| | S192R/L193R/G194R/T195R/Q196R | |

TABLE 67

| Variant of | Amino acid | |
|---|---|---|
| OKT3 heavy chain | modification | SEQ |
| constant region 2 | (EU numbering) | ID NO: |
| G1T4h0004 | S134D/T135D/S136D/G137D/S191D/ | 1031 |
| | S192D/L193D/G194D/T195D/Q196D | |
| G1T4h0006 | S134E/T135E/S136E/G137E/S191E/ | 1032 |
| | S192E/L193E/G194E/T195E/Q196E | |

[1042] The above-produced OKT3 heavy chain variant 1 and OKT3 heavy chain variant 2 were combined with the OKT3 light chain, and the OKT3 variants shown in Table 68 were expressed by transient expression using FreeStyle293 cells (Invitrogen) or Expi293 cells (Life technologies) by a method known to the person skilled in the art, and purified with Protein A by a method known to the person skilled in the art. Further, an anti-KLH antibody, IC17 (heavy chain: IC17HdK-G1T4 (SEQ ID NO: 1013), light chain: IC17L-k0 (SEQ ID NO: 1014)) was similarly prepared as a negative control.

TABLE 68

| | Heavy chain variant 1 | | Heavy chain variant 2 | | | |
|---|---|---|---|---|---|---|
| | Heavy | Heavy | Heavy | Heavy | Light | Light |
| | chain | chain | chain | chain | chain | chain |
| | variable | constant | variable | constant | variable | constant |
| | region | region | region | region | region | region |
| Antibody | SEQ ID | SEQ ID | SEQ ID | SEQ ID | SEQ ID | SEQ ID |
| name | NO: | NO: | NO: | NO: | NO: | NO: |
| OKT3_KiH | 1010 | 1015 | 1010 | 1016 | 1012 | 1011 |
| 0004//0004 | 1010 | 1030 | 1010 | 1031 | 1012 | 1011 |
| 0004//0006 | 1010 | 1030 | 1010 | 1032 | 1012 | 1011 |
| 0004//OKT3 | 1010 | 1030 | 1010 | 1016 | 1012 | 1011 |
| OKT3//0004 | 1010 | 1015 | 1010 | 1031 | 1012 | 1011 |
| OKT3//0006 | 1010 | 1015 | 1010 | 1032 | 1012 | 1011 |

### Reference Example 15-2 Preparation of Jurkat Cell Suspension

[1043] Jurkat cell suspension was prepared as in Reference Example 13-2.

### Reference Example 15-3 Preparation of Luminescence Reagent Solution

[1044] Luminescence reagent solution was prepared as in Reference Example 13-3.

### Reference Example 15-4 Assessment of T Cell Activation of Antibodies Having Substitution with Amino Acids Other than Cysteine at the Constant Region

[1045] T cell activation was assessed as in Reference Example 13-4.

[1046] As a result, OKT3 variants introduced with positively charged amino acid substitution at one constant region and with negatively charged amino acid substitution at the other constant region greatly increased the T cell activated state as compared to OKT3 as shown in FIG. 48. Meanwhile, OKT3 variants introduced with positively or negatively charged amino acid substitution at one constant region and with no modification at the other constant region hardly changed the T cell activated state as compared to OKT3. This result shows that not only cysteine substitution but also charged amino acid substitution can crosslink Fabs by noncovalent bond and enhance CD3 agonist activities.

### Reference Example 16 Assessment of CD3 Agonist Activity of Antibodies Having Cysteine Substitution within the Fab and Lacking Disulfide Bonds in the Hinge Region

### Reference Example 16-1 Production of Antibodies Having Cysteine Substitution within the Fab and Lacking Disulfide Bonds in the Hinge Region

[1047] The heavy chain of an anti-human CD3 agonist antibody, OKT3 (heavy chain: OKT3VH0000-G1T4 (SEQ ID NO: 1007), light chain: OKT3VL0000-KT0 (SEQ ID NO: 1008)), was subjected to a study in which the disulfide bonds in the hinge region were removed and an amino acid residue structurally exposed to the surface was substituted with cysteine.

[1048] Cysteine in the hinge region of OKT3 heavy chain constant region (G1T4, SEQ ID NO: 1009) was substituted with serine to produce variants of the OKT3 heavy chain constant region shown in Table 69. The amino acid residue at position 191 (EU numbering) of these variants of OKT3 heavy chain constant region was substituted with cysteine to produce variants of the OKT3 heavy chain constant region shown in Table 70. These variants of the OKT3 heavy chain constant region were each linked with the OKT3 heavy chain variable region (OKT3VH0000, SEQ ID NO: 1010) to produce OKT3 heavy chain variants, and expression vectors encoding the corresponding genes were produced by a method known to the person skilled in the art.

TABLE 69

| Variant of | Amino acid | |
|---|---|---|
| OKT3 heavy chain | modification | SEQ |
| constant region | (EU numbering) | ID NO: |
| G1T4.dh1 | C226S | 1033 |
| G1T4.dh2 | C229S | 1034 |
| G1T4.dh3 | C226S/C229S | 1035 |

TABLE 70

| Variant of | Amino acid | |
|---|---|---|
| OKT3 heavy chain | modification | SEQ |
| constant region | (EU numbering) | ID NO: |
| G1T4.S191C.dh1 | S191C/C226S | 1036 |
| G1T4.S191C.dh2 | S191C/C229S | 1037 |
| G1T4.S191C.dh3 | S191C/C226S/C229S | 1038 |

[1049] The above-produced OKT3 heavy chain variants were combined with the OKT3 light chain, and the OKT3 variants shown in Table 71 were expressed by transient expression using FreeStyle293 cells (Invitrogen) or Expi293 cells (Life technologies) by a method known to the person skilled in the art, and purified with Protein A by a method known to the person skilled in the art. Further, an anti-KLH antibody, IC17 (heavy chain: IC17HdK-G1T4 (SEQ ID NO: 1013), light chain: IC17L-k0 (SEQ ID NO: 1014)) was similarly prepared as a negative control.

TABLE 71

| | Heavy | Heavy | Light | Light |
|---|---|---|---|---|
| | chain | chain | chain | chain |
| | variable | constant | variable | constant |
| | region | region | region | region |
| Antibody | SEQ | SEQ | SEQ | SEQ |
| name | ID NO: | ID NO: | ID NO: | ID NO: |
| dh1 | 1010 | 1033 | 1012 | 1011 |
| dh2 | 1010 | 1034 | 1012 | 1011 |
| dh3 | 1010 | 1035 | 1012 | 1011 |
| H_S191C_dh1 | 1010 | 1036 | 1012 | 1011 |
| H_S191C_dh2 | 1010 | 1037 | 1012 | 1011 |
| H_S191C_dh3 | 1010 | 1038 | 1012 | 1011 |

### Reference Example 16-2 Preparation of Jurkat Cell Suspension

[1050] Jurkat cell suspension was prepared as in Reference Example 13-2.

### Reference Example 16-3 Preparation of Luminescence Reagent Solution

[1051] Luminescence reagent solution was prepared as in Reference Example 13-3.

### Reference Example 16-4 Assessment of T Cell Activation of Antibodies Having Cysteine Substitution within the Fab and Lacking Disulfide Bonds in the Hinge Region

[1052] T cell activation was assessed as in Reference Example 13-4.

[1053] As a result, OKT3 variants with only the disulfide bonds in the hinge region removed reduced or hardly changed the T cell activated state as compared to OKT3 as shown in FIG. 49. On the other hand, OKT3 variants with the disulfide bonds in the hinge region removed and introduced with cysteine substitution at the constant region greatly increased the T cell activated state as compared to OKT3. This result shows that even when there is no disulfide bond in the hinge region, cysteine substitution within the Fab can crosslink Fabs and enhance CD3 agonist activities.

### Reference Example 17 Production of Expression Vectors for Modified Antibodies, and Expression and Purification of Modified Antibodies

[1054] An antibody gene inserted in an expression vector for animal cells was subjected to amino acid residue sequence substitution by a method known to the person skilled in the art using PCR, the In-Fusion Advantage PCR cloning kit (TAKARA), or such, to construct an expression vector for a modified antibody. The nucleotide sequence of the resulting expression vector was determined by a method known to the person skilled in the art. The produced expression vector was transiently introduced into FreeStyle293 (registered trademark) or Expi293 (registered trademark) cells (Invitrogen) and the cells were allowed to express the modified antibody into culture supernatant. The modified antibody was purified from the obtained culture supernatant by a method known to the person skilled in the art using Protein A and such. Absorbance at 280 nm was measured using a spectrophotometer. An absorption coefficient was calculated from the measured value using the PACE method and used to calculate the antibody concentration (Protein Science 1995; 4:2411-2423).

### Reference Example 18 Preparation of Bispecific Antibodies

[1055] The purified antibody was dialyzed into TBS or PBS buffer and its concentration was adjusted to 1 mg/mL. As a 10× reaction buffer, 250 mM 2-MEA (SIGMA) was prepared. Two different homodimeric antibodies prepared in Reference Example 17 were mixed in equal amount. To this mixture, a 1/10 volume of the 10× reaction buffer was added and mixed. The mixture was allowed to stand at 37 degrees C. for 90 minutes. After the reaction, the mixture was dialyzed into TBS or PBS to obtain a solution of a bispecific antibody in which the above two different antibodies were heterodimerized. The antibody concentration was measured by the above-mentioned method, and the antibody was subjected to subsequent experiments.

### Reference Example 19 Assessment of Agonist Activity

### Reference Example 19-1 Preparation of Jurkat Cell Suspension

[1056] Jurkat cells (TCR/CD3 Effector Cells (NFAT), Promega) were collected from flasks. The cells were washed with Assay Buffer (RPMI 1640 medium (Gibco), 10% FBS (HyClone), 1% MEM Non Essential Amino Acids (Invitrogen), and 1 mM Sodium Pyruvate (Invitrogen)), and then suspended at 3×10⁶ cells/mL in Assay Buffer. This suspension of Jurkat cells was subjected to subsequent experiments.

### Reference Example 19-2 Preparation of Luminescence Reagent Solution

[1057] 100 mL of Bio-Glo Luciferase Assay Buffer (Promega) was added to the bottle of Bio-Glo Luciferase Assay Substrate (Promega), and mixed by inversion. The bottle was protected from light and frozen at −20 degrees C. This luminescence reagent solution was subjected to subsequent experiments.

### Reference Example 19-3 T Cell Activation Assay

[1058] T cell activation by agonist signaling was assessed based on the fold change of luciferase luminescence. The aforementioned Jurkat cells are cells transformed with a luciferase reporter gene having an NFAT responsive sequence. When the cells are stimulated by an anti-TCR/CD3 antibody, the NFAT pathway is activated via intracellular signaling, thereby inducing luciferase expression. The Jurkat cell suspension prepared as described above was added to a 384-well flat-bottomed white plate at 10 microliter per well (3×10⁴ cells/well). Next, the antibody solution prepared at each concentration (150, 15, 1.5, 0.15, 0.015, 0.0015, 0.00015, and 0.000015 nM) was added at 20 microliter per well. This plate was allowed to stand in a 5% CO₂ incubator at 37 degrees C. for 24 hours. After the incubation, the luminescence reagent solution was thawed, and 30 microliter of the solution was added to each well. The plate was then allowed to stand at room temperature for 10 minutes. Luciferase luminescence in each well of the plate was measured using a luminometer.

### Reference Example 20 Assessment of Agonist Activity of CD3 Biparatopic Antibodies Using Jurkat Cells

[1059] Antibodies were prepared and their activities were assessed according to Reference Examples 17, 18, and 19. The antibodies used in this Example are shown in Table 72.

TABLE 72

| | SEQ ID NO | | SEQ ID NO | | |
|---|---|---|---|---|---|
| | (Antibody 1): | | (Antibody 2): | | |
| Antibody | Heavy | Light | Heavy | Light | Molecular |
| name | chain | chain | chain | chain | form |
| CD3-G1sLL | 1039 | 1040 | — | — | Monospecific antibody |
| CD3//OKT3-G1s | 1041 | 1042 | 1043 | 1044 | Bispecific antibody |
| CD3//OKT3-G1sHH | 1045 | 1046 | 1047 | 1048 | Bispecific antibody |
| CD3//OKT3-G1sLH | 1049 | 1050 | 1051 | 1052 | Bispecific antibody |
| OKT3-G1s | 1053 | 1054 | — | — | Monospecific antibody |
| OKT3-G1sHH | 1055 | 1056 | — | — | Monospecific antibody |
| CD3-G1sLL + | 1057 | 1058 | 1059 | 1060 | Monospecific antibody |
| OKT3-G1s | | | | | |

[1060] As a result, modified molecules with an additional disulfide bond linking the Fab-Fab of two types of anti-CD3 bispecific antibodies showed varied CD3-mediated signaling compared to bispecific antibodies lacking the additional disulfide bond as shown in FIG. 50.

[1061] This result suggests that introducing modifications of the present invention can enhance or diminish agonist activity possessed by bispecific antigen-binding molecules having different epitopes for the same target.

### Reference Example 21 Assessment of CD137 Agonist Activity Using Jurkat Cells

[1062] Antibodies were prepared and their activities were assessed according to Reference Examples 17, 18, and 19. The antibodies used in this Reference Example were as follows: an ordinary anti-CD137 antibody, an antibody introduced with a mutation that promotes association of antibodies (hexamerization) in its heavy-chain constant region, and modified antibodies produced by linking the Fab-Fab of each of the above antibodies with an additional disulfide bond.

[1063] T cell activation by agonist signaling was assessed based on the fold change of luciferase luminescence. The cells of GloResponse™ NF-kappa B-Luc2/4-1BB Jurkat cell line (Promega) are cells transformed with a luciferase reporter gene having an NFAT responsive sequence. When the cells are stimulated by an anti-CD137 antibody, the NFAT pathway is activated via intracellular signaling, thereby inducing luciferase expression. The Jurkat cell suspension prepared at 2×10⁶ cells/mL with Assay medium (99% RPMI, 1% FBS) was added to a 96-well flat-bottomed white plate at 25 microliter per well (5×10⁴ cells/well). Next, the antibody solution containing ATP or the antibody solution without ATP prepared at each antibody concentration (final concentration: 45, 15, 5, 1.667, 0.556, 0.185, 0.062, and 0.021 microgram/mL) was added at 25 microliter per well. The final concentration of ATP was 250 nM. This plate was allowed to stand in a 5% CO₂ incubator at 37 degrees C. for 6 hours. After the incubation, the luminescence reagent solution was thawed, and 75 microliter of the solution was added to each well. The plate was then allowed to stand at room temperature for 10 minutes. Luciferase luminescence in each well of the plate was measured using a luminometer. The value of the luminescence of each well divided by the value of the luminescence of the well without antibody addition was defined as Luminescence fold, and it served as an indicator for assessing the activity of each antibody.

[1064] As a result, antibodies introduced with the hexamerization modification showed increased agonist activity as compared to an ordinary anti-CD137 antibody. Further, in modified antibodies where each of the antibodies was introduced with additional disulfide bonds, synergistic increase in agonist activity was observed. This result suggests that introducing modifications of the present invention can enhance the activity of an anti-CD137 agonist antibody.

### Reference Example 22 Assessment of Agonist Activity of CD3//PD1 Bispecific Antibodies Using Jurkat Cells

### Reference Example 22-1

[1065] Antibodies were prepared and their activities were assessed according to Reference Examples 17, 18, and 19. The antibodies used in this Example are shown in Table 74.

TABLE 74

| | SEQ ID NO | | SEQ ID NO | | |
|---|---|---|---|---|---|
| | (Antibody 1): | | (Antibody 2): | | |
| Antibody | Heavy | Light | Heavy | Light | Molecular |
| name | chain | chain | chain | chain | form |
| OKT3//117-G1silent | 1113 | 1114 | 1115 | 1116 | Bispecific antibody |
| OKT3//117-G1silentLL | 1117 | 1118 | 1119 | 1120 | Bispecific antibody |
| OKT3//117-G1silentHH | 1121 | 1122 | 1123 | 1124 | Bispecific antibody |
| OKT3//117-G1silentHL | 1125 | 1126 | 1127 | 1128 | Bispecific antibody |
| OKT3//10-G1silent | 1129 | 1130 | 1131 | 1132 | Bispecific antibody |
| OKT3//10-G1silentHH | 1133 | 1134 | 1135 | 1136 | Bispecific antibody |
| OKT3//10-G1silentHL | 1137 | 1138 | 1139 | 1140 | Bispecific antibody |
| CD3//949-G1silent | 1141 | 1142 | 1143 | 1144 | Bispecific antibody |
| CD3//949-G1silentLL | 1145 | 1146 | 1147 | 1148 | Bispecific antibody |
| CD3//949-G1silentHH | 1149 | 1150 | 1151 | 1152 | Bispecific antibody |
| CD3//949-G1silentLH | 1153 | 1154 | 1155 | 1156 | Bispecific antibody |
| CD3//949-G1silentHL | 1157 | 1158 | 1159 | 1160 | Bispecific antibody |
| OKT3//949-G1silent | 1161 | 1162 | 1163 | 1164 | Bispecific antibody |
| OKT3//949-G1silentLL | 1165 | 1166 | 1167 | 1168 | Bispecific antibody |
| OKT3//949-G1silentHH | 1169 | 1170 | 1171 | 1172 | Bispecific antibody |
| OKT3//949-G1silentHL | 1173 | 1174 | 1175 | 1176 | Bispecific antibody |

[1066] As a result, in multiple bispecific antibodies consisting of a combination of an anti-CD3 antibody and an anti-PD1 antibody, modified molecules with an additional disulfide bond linking the Fab-Fab showed greatly varied CD3- and/or PD1-mediated signaling compared to bispecific antibodies lacking the additional disulfide bond as shown in FIG. 51.

[1067] This result suggests that introducing modifications of the present invention can enhance or diminish agonist activity possessed by antigen-binding molecules such as antibodies.

### Reference Example 22-2

[1068] Antibodies were prepared and their activities were assessed according to Reference Examples 2, 3, and 4. The antibodies used in this Reference Example are shown in Table 75.

TABLE 75

| | SEQ ID NO | | SEQ ID NO | | |
|---|---|---|---|---|---|
| | (Antibody 1): | | (Antibody 2): | | |
| Antibody | Heavy | Light | Heavy | Light | Molecular |
| name | chain | chain | chain | chain | form |
| OKT3//949-G1silent | 1161 | 1162 | 1163 | 1164 | Bispecific antibody |
| OKT3//949-G1silentHH | 1169 | 1170 | 1171 | 1172 | Bispecific antibody |
| OKT3//949-G1silentHL | 1173 | 1174 | 1175 | 1176 | Bispecific antibody |
| OKT3//949-G1silentLL | 1165 | 1166 | 1167 | 1168 | Bispecific antibody |
| OKT3//949-G1silentLH | 1177 | 1178 | 1179 | 1180 | Bispecific antibody |

[1069] The presence or absence of PD-1 agonist signaling was assessed by the ratio of the fluorescent signal from BRET when PD-1 is in the vicinity of SHP2 (618 nm) and the luminescence originating from SHP2, which is the donor (460 nm). One day before the assay, antigen presenting cells expressing PD-L1 (Promega, #J109A) were seeded into F-12 medium containing 10% FBS (Gibco, 11765-054) in a 96-well plate (Costar, #3917) at 4.0×10⁴ cells/100 microliter/well, and the cells were cultured in a CO₂ incubator for 16-24 hours at 37 degrees C. On the day of the assay, HaloTag nanoBRET 618 Ligand (Promega, #G980A) was diluted 250-fold with Opti-MEM (Gibco, #31985-062). The medium for culturing PD-L1-expressing antigen presenting cells were removed, and the diluted HaloTag nanoBRET 618 Ligand was added at 25 microliter/well. The specimen for assessment diluted with Opti-MEM containing 10 microgram/mL of PD-L1-inhibiting antibodies (40, 8, and 1.6 microgram/mL) was added at 25 microliter/well. PD-1/SHP2 Jurkat cells (Promega, #CS2009A01) were added to the above-noted 96-well plate at 5×10⁴ cells/50 microliter/well, thoroughly suspended, and then incubated in a CO₂ incubator for 2.5 hours at 37 degrees C. nanoBRET Nano-Glo substrate (Promega, #N157A) was diluted 100-fold with Opti-MEM, and this was added at 25 microliter/well to the 96-well plate after incubation. The plate was allowed to stand at room temperature for 30 minutes, and then the Em460 mM and Em618 nm were measured using Envision (PerkinElmer, 2104 EnVision). The obtained values were applied to the following equation to calculate the BRET Ratio (mBU).

618 nm/460 nm=BU

BU×1000=mBU

Mean mBUₑₓₚₑᵣᵢₘₑₙₜₐₗ−Mean mBU_{no PD-L1 block control}=BRET Ratio (mBU)

[1070] As a result, in the bispecific antibodies consisting of an anti-CD3 antibody and an anti-PD1 antibody, modified molecules with an additional disulfide bond linking the Fab-Fab showed greatly varied CD3- and/or PD1-mediated signaling compared to bispecific antibodies lacking the additional disulfide bond as shown in FIG. 52.

### Reference Example 23 Assessment of Agonist Activity of CD28/CD3 Clamping Bispecific Antibodies

### Reference Example 23-1 Real-Time Cell Growth Inhibition Assay (xCELLigence Assay)

[1071] Antibodies were prepared according to Reference Examples 17 and 18. The antibodies used in this Example are shown in Table 76.

TABLE 76

| | SEQ ID NO | | SEQ ID NO | | |
|---|---|---|---|---|---|
| | (Antibody 1): | | (Antibody 2): | | |
| Antibody | Heavy | Light | Heavy | Light | Molecular |
| name | chain | chain | chain | chain | form |
| GPC3/attCE115 | 1181 | 1182 | 1183 | 1184 | Bispecific antibody |
| GPC3/attCE115_LL | 1185 | 1186 | 1187 | 1188 | Bispecific antibody |
| KLH/clamp CD3 | 1189 | 1190 | 1191 | 1192 | Bispecific antibody |
| GPC3/clamp CD3 | 1193 | 1194 | 1195 | 1196 | Bispecific antibody |
| CD28/clamp CD3 | 1197 | 1198 | 1199 | 1200 | Bispecific antibody |
| CD28/clamp CD3_HH | 1201 | 1202 | 1203 | 1204 | Bispecific antibody |

[1072] T cell-dependent cancer cell growth inhibitory effect of the antibodies was assessed using xCELLigence RTCA MP instrument (ACEA Biosciences). Cells of the human liver cancer cell line SK-Hep-1 forced to express Glypican-3 (GPC3) (SEQ ID NO: 1241) (SK-pca31a) were used as target cells, and human peripheral blood mononuclear cells (PBMC: Cellular Technology Limited (CTL)) were used as effector cells. 1×10⁴ cells of SK-pca31a were seeded onto E-Plate 96 (ACEA Biosciences). On the next day were added 2×10⁵ cells of PBMC and antibodies to make a final concentration of 0.001, 0.01, 0.1, 1, or 10 microgram/mL. Cell growth was monitored every 15 minutes with xCELLigence, and culturing was continued for 72 hours. Cell growth inhibitory effect (CGI: %) was calculated by the following equation.

CGI (%)=100−(CI_{Ab}×100/CI_{NoAb})

[1073] In the above equation, “CI_{Ab}” is the Cell index for a well at 72 hours after addition of an antibody (cell growth index measured with xCELLigence). Further, “CI_{NoAb}” is the Cell index for a well after 72 hours without antibody addition.

### Reference Example 23-2 Cytokine Production Assay

[1074] Cytokine production from T cells by antibodies was assessed as discussed below.

[1075] SK-pca31a was used as the target cell and PBMC (Cellular Technology Limited (CTL)) was used as the effector cell. 1×10⁴ cells of SK-pca31a were seeded onto a 96-well plate. On the next day were added 2×10⁵ cells of PBMC and antibodies to make a final concentration of 0.01, 0.1, 1, or 10 microgram/mL. The culture supernatant was collected after 72 hours, and human IL-6 was measured using AlphaLISA (PerkinElmer).

### Results

[1076] Combined use of CD28/CD3 clamping bispecific antibody and GPC3/binding-attenuated CD3 bispecific antibody did not result in cell growth inhibitory effects. However, inhibitory effects on cancer cell growth were observed by applying modifications for introducing an additional disulfide bond between the Fab-Fab of the CD28/CD3 clamping bispecific antibody (FIGS. 53 and 55). Further, cytokine production was observed when a CD28/CD3 clamping bispecific antibody introduced with the above-noted modification and a GPC3/binding-attenuated CD3 bispecific antibody were cocultured with GPC3 expressing strain and PBMC; however, mere addition of a CD28/CD3 clamping bispecific antibody introduced with the above-noted modification and a GPC3/binding-attenuated CD3 bispecific antibody to PBMC did not result in cytokine production (FIGS. 54 and 56). Accordingly, it was suggested that the effect of the CD28/CD3 clamping bispecific antibody introduced with the above-noted modification and GPC3/binding-attenuated CD3 bispecific antibody on inhibiting cancer cell growth and inducing cytokine production in T cells depends on the expression of cancer antigen.

### Reference Example 24 Assessment of Agonist Activity of CD8/CD28 Bispecific Antibodies

[1077] Antibodies were prepared according to Reference Examples 17 and 18. The antibodies used in this Reference Example are shown in Table 77.

TABLE 77

| | SEQ ID NO | | SEQ ID NO | | |
|---|---|---|---|---|---|
| | (Antibody 1): | | (Antibody 2): | | |
| Antibody | Heavy | Light | Heavy | Light | Molecular |
| name | chain | chain | chain | chain | form |
| KLH-P587 | 1205 | 1206 | — | — | Monospecific antibody |
| CD8/CD28-P587 | 1207 | 1208 | 1209 | 1210 | Bispecific antibody |
| CD8/CD28-P587(HH) | 1211 | 1212 | 1213 | 1214 | Bispecific antibody |
| CD8/CD28-P587(LL) | 1219 | 1220 | 1221 | 1222 | Bispecific antibody |
| CD8/CD28-P587(HL) | 1223 | 1224 | 1225 | 1226 | Bispecific antibody |
| CD8/CD28-P587(LH) | 1227 | 1228 | 1229 | 1230 | Bispecific antibody |

[1078] Human peripheral blood mononuclear cells (PBMCs) isolated from healthy volunteer blood samples were used for assessing the prepared specimen. Heparin (0.5 mL) was mixed with 50 mL of blood and was further diluted with 50 mL PBS. Human PBMCs were isolated by the following two steps. In step 1, Leucosep (greiner bio-one) added with Ficoll-Paque PLUS (GE Healthcare) was centrifuged at 1000×g for 1 minute under room temperature, then blood diluted with PBS was added thereto and the mixture was centrifuged at 400×g for 30 minutes under room temperature. In step 2, the buffy coat was collected from the tube after centrifugation and then washed with 60 mL PBS (Wako). The isolated human PBMCs were adjusted to a cell density of 1×10⁷/mL with a medium (5% human serum (SIGMA), 95% AIM-V (Thermo Fischer Scientific)). The resulting cell suspension was seeded onto the wells of a 24-well plate at 1 mL/well and the plate was incubated in a 5% CO₂ incubator at 37 degrees C.

[1079] Two days later, the medium was removed from the seeded cells and the cells were washed with 500 microliter PBS, and then collected using accutase (nacalai tesque). Next, the cells were adjusted to make a cell density of 1×10⁶/mL with ViaFluor 405 (Biotium) solution diluted with PBS to make a final concentration of 2 micromolar, and then allowed to stand at 37 degrees C. for 15 minutes. Subsequently, the cells were suspended again with a medium and then seeded onto the wells of a 96-well plate at 2×10⁵ cells per well. Antibody solution was added thereto to make a final concentration of 0.1, 1, and 10 microgram/mL, and the cells were cultured in a 5% CO₂ incubator for 4 days at 37 degrees C.

[1080] After the end of culturing, the percentage of grown cells was investigated using a flow cytometer (BD LSRFortessa™ X-20 (BD Biosciences)) (FCM). The percentage of grown cells was calculated from the percentage of reduced ViaFluor 405 fluorescence intensity. Fluorescently-labeled anti-CD8 alpha antibody, anti-CD4 antibody, anti-Foxp3 antibody, and such were used for performing an analysis with CD8 alpha positive T cells and regulatory T (Treg) cells. As a result, increase in activity was observed in some specimens as shown in FIG. 57.

### Reference Example 25 Assessment of Disulfide Bond Formation Between the Introduced Cysteines

[1081] Modified antibodies were produced by introducing cysteine into the light and heavy chains of a humanized model antibody, and the formation of disulfide bond between the newly introduced cysteines was assessed. Assessment was carried out by incubating sample antibodies in 20 mM phosphate buffer (pH 7.0) with chymotrypsin and detecting the mass of peptides presumed to be produced from the amino acid sequence of each antibody, using LC/MS. Each antibody was prepared according to Reference Examples 17 and 18. The antibodies used in this Example are shown in Table 78.

TABLE 78

| | SEQ ID NO | | SEQ ID NO | | |
|---|---|---|---|---|---|
| | (Antibody 1): | | (Antibody 2): | | |
| Antibody | Heavy | Light | Heavy | Light | Molecular |
| name | chain | chain | chain | chain | form |
| MRA-G1_LL | 1231 | 1232 | — | — | Monospecific antibody |
| MRA-G2_LL | 1233 | 1234 | — | — | Monospecific antibody |
| MRA-G4_LL | 1235 | 1236 | — | — | Monospecific antibody |
| MRA-G1T4.S191C | 1237 | 1238 | — | — | Monospecific antibody |
| MRA-G1T4.A162C | 1239 | 1240 | — | — | Monospecific antibody |

[1082] First, modified antibodies of different subclass (IgG1, IgG2, and IgG4) in which lysine at position 126 (Kabat numbering) of the light chain was substituted with cysteine were analyzed. As a result, in all of the antibodies analyzed, components that correspond to the theoretical mass of a peptide having a disulfide bond between the cysteines at position 126 were detected, as shown in Table 79. Further, this component disappeared when tris(2-carboxyethyl)phosphine, which has the reducing effect of disulfide bonds, was added to the IgG1 sample, suggesting that a disulfide bond is formed between the cysteines at position 126 in this peptide. At the same time, it was suggested that the difference in subclass does not affect this disulfide bond formation.

TABLE 79

| | | Theoretical | Measured value (Da) | | | |
|---|---|---|---|---|---|---|
| | | mass | IgG1 | | IgG2 | IgG4 |
| Peptide | Ion | (Da) | unreduced | reduced | unreduced | unreduced |
| ((IFPPSDEQLC¹²⁶SGTASVVCL)- | [M + 4H]⁴⁺ | 1460.2 | 1460.2 | n.d. | 1460.2 | 1460.2 |
| (ACEVTHQGL))2 | [M + 5H]⁵⁺ | 1168.3 | 1168.4 | n.d. | 1168.4 | 1168.3 |
| | [M + 6H]⁶⁺ | 973.8 | 973.8 | n.d. | 973.8 | 973.8 |

n.d.: not detected

[1083] Next, analysis was performed on modified antibodies in which alanine at position 162 (EU numbering), or serine at position 191 (EU numbering) of IgG1 heavy chain was substituted with cysteine. As a result, components that correspond to the theoretical mass of a peptide having a disulfide bond between the introduced cysteines were detected, as shown respectively in Tables 80 and 81. Further, this component disappeared when tris(2-carboxyethyl)phosphine was added to the sample of a modified antibody introduced with position 191 cysteine (Table 81). From the above, it was suggested that a disulfide bond is formed between cysteines also introduced into the heavy chain.

TABLE 80

| | | Theoretical | Measured |
|---|---|---|---|
| Peptide | Ion | mass (Da) | value (Da) |
| (NSGC¹⁶²L)₂ | [M + H]⁺ | 983.4 | 983.4 |
| | [M + 2H]²⁺ | 492.2 | 492.2 |

TABLE 81

| | | Theoretical | Measured value (Da) | |
|---|---|---|---|---|
| Peptide | Ion | mass (Da) | unreduced | reduced |
| SLSSVVTVPSC¹⁹¹SLGTQTY)₂ | [M + 2H]²⁺ | 1827.9 | 1827.9 | n.d. |
| | [M = 3H]³⁺ | 1218.9 | 1218.9 | n.d. |

n.d.: not detected

[1084] Although the foregoing invention has been described in some detail by way of illustration and example for purposes of clarity of understanding, the descriptions and examples should not be construed as limiting the scope of the invention. The disclosures of all patent and scientific literature cited herein are expressly incorporated in their entirety by reference.

### INDUSTRIAL APPLICABILITY

[1085] In a non-limiting embodiment, the antigen-binding molecule of the present disclosure is useful in that it can hold multiple antigen molecules at spatially close positions, regulate interaction between multiple antigen molecules, and/or regulate activation of multiple antigen molecules which are activated by association with each other. In other embodiments, the antigen-binding molecule of the present disclosure is useful in that it has increased resistance to protease cleavage as compared to conventional antigen-binding molecules.

### Sequence Listing C1-A1928Psq_txt

The application's sequence listing, which the Patent Office published only in electronic form, follows.

SEQUENCE LISTING (1429 sequences)

SEQ ID NO: 1 - protein, 447 aa, Artificial Sequence
  An artificially synthesized sequence
QVQLVESGGGVVQPGGSLRLSCAASGFTFSNAWMHWVRQAPGKGLEWVAQIKDKSQNYATYVAESVKGRFTISRADSKNSIYLQMNSLKTEDTAVYYCRYVHYAAGYGVDIWGQGTTVTVSSASTKGPSVFPLAPCSRSTSESTAALGCLVKDYFPEPVTVSWNSGALTSGVHTFPAVLQSSGLYSLSSVVTVPSSSLGTQTYTCNVDHKPSNTKVDKRVESKYGPPCPPCPAPEFRRGPSVFLFPPKPKDTLMISRTPEVTCVVVDVSQEDPEVQFNWYVDGVEVHNAKTKPREEQYNSTYRVVSVLTVLHQDWLNGKEYKCKVSNKGLPSSIEKTISKAKGQPREPQVYTLPPSQEEMTKNQVSLTCLVKGFYPSDIAVEWESNGQPENNYKTTPPVLDSDGSFFLYSRLTVDKSRWQEGNVFSCSVMHEALHNHYTQKSLSLSP

SEQ ID NO: 2 - protein, 447 aa, Artificial Sequence
  An artificially synthesized sequence
QVQLVESGGGVVQPGGSLRLSCAASGFTFSNAWMHWVRQAPGKGLEWVAQIKDKSQNYATYVAESVKGRFTISRADSKNSIYLQMNSLKTEDTAVYYCRYVHYAAGYGVDIWGQGTTVTVSSASTKGPSVFPLAPCSRSTSESTAALGCLVKDYFPEPVTVSWNSGALTSGVHTFPAVLQSSGLYSLSSVVTVPSCSLGTQTYTCNVDHKPSNTKVDKRVESKYGPPCPPCPAPEFRRGPSVFLFPPKPKDTLMISRTPEVTCVVVDVSQEDPEVQFNWYVDGVEVHNAKTKPREEQYNSTYRVVSVLTVLHQDWLNGKEYKCKVSNKGLPSSIEKTISKAKGQPREPQVYTLPPSQEEMTKNQVSLTCLVKGFYPSDIAVEWESNGQPENNYKTTPPVLDSDGSFFLYSRLTVDKSRWQEGNVFSCSVMHEALHNHYTQKSLSLSP

SEQ ID NO: 3 - protein, 447 aa, Artificial Sequence; identical to SEQ ID NO: 1
  An artificially synthesized sequence

SEQ ID NO: 4 - protein, 450 aa, Artificial Sequence
  An artificially synthesized sequence
QVQLVESGGGVVQPGGSLRLSCAASGFTFSNAWMHWVRQAPGKGLEWVAQIKDKSQNYATYVAESVKGRFTISRADSKNSIYLQMNSLKTEDTAVYYCRYVHYAAGYGVDIWGQGTTVTVSSASTKGPSVFPLAPSSKSTSGGTAALGCLVKDYFPEPVTVSWNSGALTSGVHTFPAVLQSSGLYSLSSVVTVPSSSLGTQTYICNVNHKPSNTKVDKKVEPKSCDKTHTCPPCPAPELRGGPKVFLFPPKPKDTLMISRTPEVTCVVVDVSHEDPEVKFNWYVDGVEVHNAKTKPREEQYASTYRVVSVLTVLHQDWLNGKEYKCKVSNKALPAPIEKTISKAKGQPREPQVYTLPPSRKEMTKNQVSLTCLVKGFYPSDIAVEWESNGQPENNYKTTPPYLDSDGSFFLYSKLTVDKSRWQQGNVFSCSVMHEALHNHYTQKSLSLSP

SEQ ID NO: 5 - protein, 447 aa, Artificial Sequence
  An artificially synthesized sequence
QVQLQQSGAELARPGASVKMSCKASGYTFTRYTMHWVKQRPGQGLEWIGYINPSRGYTNYNQKFKDKATLTTDKSSSTAYMQLSSLTSEDSAVYYCARYYDDHYCLDYWGQGTTLTVSSASTKGPSVFPLAPSSKSTSGGTAALGCLVKDYFPEPVTVSWNSGALTSGVHTFPAVLQSSGLYSLSSVVTVPSSSLGTQTYICNVNHKPSNTKVDKKVEPKSCDKTHTCPPCPAPELRGGPKVFLFPPKPKDTLMISRTPEVTCVVVDVSHEDPEVKFNWYVDGVEVHNAKTKPREEQYASTYRVVSVLTVLHQDWLNGKEYKCKVSNKALPAPIEKTISKAKGQPREPQVYTLPPSRKEMTKNQVSLTCLVKGFYPSDIAVEWESNGQPENNYKTTPPYLDSDGSFFLYSKLTVDKSRWQQGNVFSCSVMHEALHNHYTQKSLSLSP

SEQ ID NO: 6 - protein, 448 aa, Artificial Sequence
  An artificially synthesized sequence
QVQLVQSGAEVKKPGASVKVSCKASGYTFTSYYIHWVRQAPGQGLEWIGCIYPGNVNTNYNEKFKDRATLTVDTSISTAYMELSRLRSDDTAVYFCTRSHYGLDWNFDVWGQGTTVTVSSASTKGPSVFPLAPSSKSTSGGTAALGCLVKDYFPEPVTVSWNSGALTSGVHTFPAVLQSSGLYSLSSVVTVPSSSLGTQTYICNVNHKPSNTKVDKKVEPKSCDKTHTCPPCPAPELRGGPKVFLFPPKPKDTLMISRTPEVTCVVVDVSHEDPEVKFNWYVDGVEVHNAKTKPREEQYASTYRVVSVLTVLHQDWLNGKEYKCKVSNKALPAPIEKTISKAKGQPREPQVYTLPPSREEMTKNQVSLTCLVKGFYPSDIAVEWESNGQPENNYKTTPPYLDSDGSFFLYSKLTVDKSRWQQGNVFSCSVMHEALHNHYTQESLSLSP

SEQ ID NO: 7 - protein, 450 aa, Artificial Sequence
  An artificially synthesized sequence
QVQLVESGGGVVQPGGSLRLSCAASGFTFSNAWMHWVRQAPGKGLEWVAQIKDKSQNYATYVAESVKGRFTISRADSKNSIYLQMNSLKTEDTAVYYCRYVHYAAGYGVDIWGQGTTVTVSSASTKGPSVFPLAPSSKSTSGGTAALGCLVKDYFPEPVTVSWNSGALTSGVHTFPAVLQSSGLYSLSSVVTVPSCSLGTQTYICNVNHKPSNTKVDKKVEPKSCDKTHTCPPCPAPELRGGPKVFLFPPKPKDTLMISRTPEVTCVVVDVSHEDPEVKFNWYVDGVEVHNAKTKPREEQYASTYRVVSVLTVLHQDWLNGKEYKCKVSNKALPAPIEKTISKAKGQPREPQVYTLPPSRKEMTKNQVSLTCLVKGFYPSDIAVEWESNGQPENNYKTTPPYLDSDGSFFLYSKLTVDKSRWQQGNVFSCSVMHEALHNHYTQKSLSLSP

SEQ ID NO: 8 - protein, 447 aa, Artificial Sequence
  An artificially synthesized sequence
QVQLQQSGAELARPGASVKMSCKASGYTFTRYTMHWVKQRPGQGLEWIGYINPSRGYTNYNQKFKDKATLTTDKSSSTAYMQLSSLTSEDSAVYYCARYYDDHYCLDYWGQGTTLTVSSASTKGPSVFPLAPSSKSTSGGTAALGCLVKDYFPEPVTVSWNSGALTSGVHTFPAVLQSSGLYSLSSVVTVPSCSLGTQTYICNVNHKPSNTKVDKKVEPKSCDKTHTCPPCPAPELRGGPKVFLFPPKPKDTLMISRTPEVTCVVVDVSHEDPEVKFNWYVDGVEVHNAKTKPREEQYASTYRVVSVLTVLHQDWLNGKEYKCKVSNKALPAPIEKTISKAKGQPREPQVYTLPPSRKEMTKNQVSLTCLVKGFYPSDIAVEWESNGQPENNYKTTPPYLDSDGSFFLYSKLTVDKSRWQQGNVFSCSVMHEALHNHYTQKSLSLSP

SEQ ID NO: 9 - protein, 448 aa, Artificial Sequence
  An artificially synthesized sequence
QVQLVQSGAEVKKPGASVKVSCKASGYTFTSYYIHWVRQAPGQGLEWIGCIYPGNVNTNYNEKFKDRATLTVDTSISTAYMELSRLRSDDTAVYFCTRSHYGLDWNFDVWGQGTTVTVSSASTKGPSVFPLAPSSKSTSGGTAALGCLVKDYFPEPVTVSWNSGALTSGVHTFPAVLQSSGLYSLSSVVTVPSCSLGTQTYICNVNHKPSNTKVDKKVEPKSCDKTHTCPPCPAPELRGGPKVFLFPPKPKDTLMISRTPEVTCVVVDVSHEDPEVKFNWYVDGVEVHNAKTKPREEQYASTYRVVSVLTVLHQDWLNGKEYKCKVSNKALPAPIEKTISKAKGQPREPQVYTLPPSREEMTKNQVSLTCLVKGFYPSDIAVEWESNGQPENNYKTTPPYLDSDGSFFLYSKLTVDKSRWQQGNVFSCSVMHEALHNHYTQESLSLSP

SEQ ID NO: 10 - protein, 219 aa, Artificial Sequence
  An artificially synthesized sequence
DIVMTQSPLSLPVTPGEPASISCRSSQPLVHSNRNTYLHWYQQKPGQAPRLLIYKVSNRFSGVPDRFSGSGSGTDFTLKISRVEAEDVGVYYCGQGTQVPYTFGQGTKLEIKRTVAAPSVFIFPPSDEQLKSGTASVVCLLNNFYPREAKVQWKVDNALQSGNSQESVTEQDSKDSTYSLSSTLTLSKADYEKHKVYACEVTHQGLSSPVTKSFNRGEC

SEQ ID NO: 11 - protein, 219 aa, Artificial Sequence
  An artificially synthesized sequence
DIVMTQSPLSLPVTPGEPASISCRSSQPLVHSNRNTYLHWYQQKPGQAPRLLIYKVSNRFSGVPDRFSGSGSGTDFTLKISRVEAEDVGVYYCGQGTQVPYTFGQGTKLEIKRTVAAPSVFIFPPSDEQLCSGTASVVCLLNNFYPREAKVQWKVDNALQSGNSQESVTEQDSKDSTYSLSSTLTLSKADYEKHKVYACEVTHQGLSSPVTKSFNRGEC

SEQ ID NO: 12 - protein, 213 aa, Artificial Sequence
  An artificially synthesized sequence
QIVLTQSPAIMSASPGEKVTMTCSASSSVSYMNWYQQKSGTSPKRWIYDTSKLASGVPAHFRGSGSGTSYSLTISGMEAEDAATYYCQQWSSNPFTFGSGTKLEINRTVAAPSVFIFPPSDEQLKSGTASVVCLLNNFYPREAKVQWKVDNALQSGNSQESVTEQDSKDSTYSLSSTLTLSKADYEKHKVYACEVTHQGLSSPVTKSFNRGEC

SEQ ID NO: 13 - protein, 214 aa, Artificial Sequence
  An artificially synthesized sequence
DIQMTQSPSSLSASVGDRVTITCHASQNTYVWLNWYQQKPGKAPKLLIYKASNLHTGVPSRFSGSGSGTDFTLTISSLQPEDFATYYCQQGQTYPYTFGGGTKVEIKRTVAAPSVFIFPPSDEQLKSGTASVVCLLNNFYPREAKVQWKVDNALQSGNSQESVTEQDSKDSTYSLSSTLTLSKADYEKHKVYACEVTHQGLSSPVTKSFNRGEC

SEQ ID NO: 14 - protein, 214 aa, Artificial Sequence
  An artificially synthesized sequence
DIQMTQSPSSLSASVGDRVTITCHASQNTYVWLNWYQQKPGKAPKLLIYKASNLHTGVPSRFSGSGSGTDFTLTISSLQPEDFATYYCQQGQTYPYTFGGGTKVEIKRTVAAPSVFIFPPSDEQLCSGTASVVCLLNNFYPREAKVQWKVDNALQSGNSQESVTEQDSKDSTYSLSSTLTLSKADYEKHKVYACEVTHQGLSSPVTKSFNRGEC

SEQ ID NO: 15 - protein, 447 aa, Artificial Sequence
  An artificially synthesized sequence
QVQLQESGPGLVRPSQTLSLTCTVSGYSITSDHAWSWVRQPPGRGLEWIGYISYSGITTYNPSLKSRVTMLRDTSKNQFSLRLSSVTAADTAVYYCARSLARTTAMDYWGQGSLVTVSSASTKGPSVFPLAPSSKSTSGGTAALGCLVKDYFPEPVTVSWNSGALTSGVHTFPAVLQSSGLYSLSSVVTVPSSSLGTQTYICNVNHKPSNTKVDKRVEPKSCDKTHTCPPCPAPELRRGPSVFLFPPKPKDTLMISRTPEVTCVVVDVSHEDPEVKFNWYVDGVEVHNAKTKPREEQYNSTYRVVSVLTVLHQDWLNGKEYKCKVSNKGLPSSIEKTISKAKGQPREPQVYTLPPSREEMTKNQVSLTCLVKGFYPSDIAVEWESNGQPENNYKTTPPVLDSDGSFFLYSKLTVDKSRWQEGNVFSCSVMHEALHNHYTQKSLSLSP

SEQ ID NO: 16 - protein, 214 aa, Artificial Sequence [sequence omitted]

SEQ ID NO: 17 - protein, 119 aa, Artificial Sequence [sequence omitted]

SEQ ID NO: 18 - protein, 328 aa, Artificial Sequence
  An artificially synthesized sequence
ASTKGPSVFPLAPSSKSTSGGTAALGCLVKDYFPEPVTVSWNSGALTSGVHTFPAVLQSSGLYSLSSVVTVPSSSLGTQTYICNVNHKPSNTKVDKRVEPKSCDKTHTCPPCPAPELRRGPSVFLFPPKPKDTLMISRTPEVTCVVVDVSHEDPEVKFNWYVDGVEVHNAKTKPREEQYNSTYRVVSVLTVLHQDWLNGKEYKCKVSNKGLPSSIEKTISKAKGQPREPQVYTLPPSREEMTKNQVSLTCLVKGFYPSDIAVEWESNGQPENNYKTTPPVLDSDGSFFLYSKLTVDKSRWQEGNVFSCSVMHEALHNHYTQKSLSLSP

SEQ ID NO: 19 - protein, 107 aa, Artificial Sequence [sequence omitted]

SEQ ID NO: 20 - protein, 107 aa, Artificial Sequence [sequence omitted]

SEQ ID NO: 21 - protein, 119 aa, Artificial Sequence
  An artificially synthesized sequence
QVQLCESGPGLVRPSQTLSLTCTVSGYSITSDHAWSWVRQPPGRGLEWIGYISYSGITTYNPSLKSRVTMLRDTSKNQFSLRLSSVTAADTAVYYCARSLARTTAMDYWGQGSLVTVSS

SEQ ID NO: 22 - protein, 119 aa, Artificial Sequence
  An artificially synthesized sequence
QVQLQCSGPGLVRPSQTLSLTCTVSGYSITSDHAWSWVRQPPGRGLEWIGYISYSGITTYNPSLKSRVTMLRDTSKNQFSLRLSSVTAADTAVYYCARSLARTTAMDYWGQGSLVTVSS

SEQ ID NO: 23 - protein, 119 aa, Artificial Sequence
  An artificially synthesized sequence
QVQLQECGPGLVRPSQTLSLTCTVSGYSITSDHAWSWVRQPPGRGLEWIGYISYSGITTYNPSLKSRVTMLRDTSKNQFSLRLSSVTAADTAVYYCARSLARTTAMDYWGQGSLVTVSS

SEQ ID NO: 24 - protein, 119 aa, Artificial Sequence
  An artificially synthesized sequence
QVQLQESCPGLVRPSQTLSLTCTVSGYSITSDHAWSWVRQPPGRGLEWIGYISYSGITTYNPSLKSRVTMLRDTSKNQFSLRLSSVTAADTAVYYCARSLARTTAMDYWGQGSLVTVSS

SEQ ID NO: 25 - protein, 119 aa, Artificial Sequence
  An artificially synthesized sequence
QVQLQESGCGLVRPSQTLSLTCTVSGYSITSDHAWSWVRQPPGRGLEWIGYISYSGITTYNPSLKSRVTMLRDTSKNQFSLRLSSVTAADTAVYYCARSLARTTAMDYWGQGSLVTVSS

SEQ ID NO: 26 - protein, 119 aa, Artificial Sequence
  An artificially synthesized sequence
QVQLQESGPCLVRPSQTLSLTCTVSGYSITSDHAWSWVRQPPGRGLEWIGYISYSGITTYNPSLKSRVTMLRDTSKNQFSLRLSSVTAADTAVYYCARSLARTTAMDYWGQGSLVTVSS

SEQ ID NO: 27 - protein, 119 aa, Artificial Sequence
  An artificially synthesized sequence
QVQLQESGPGCVRPSQTLSLTCTVSGYSITSDHAWSWVRQPPGRGLEWIGYISYSGITTYNPSLKSRVTMLRDTSKNQFSLRLSSVTAADTAVYYCARSLARTTAMDYWGQGSLVTVSS

SEQ ID NO: 28 - protein, 119 aa, Artificial Sequence
  An artificially synthesized sequence
QVQLQESGPGLCRPSQTLSLTCTVSGYSITSDHAWSWVRQPPGRGLEWIGYISYSGITTYNPSLKSRVTMLRDTSKNQFSLRLSSVTAADTAVYYCARSLARTTAMDYWGQGSLVTVSS

SEQ ID NO: 29 - protein, 119 aa, Artificial Sequence
  An artificially synthesized sequence
QVQLQESGPGLVCPSQTLSLTCTVSGYSITSDHAWSWVRQPPGRGLEWIGYISYSGITTYNPSLKSRVTMLRDTSKNQFSLRLSSVTAADTAVYYCARSLARTTAMDYWGQGSLVTVSS

SEQ ID NO: 30 - protein, 119 aa, Artificial Sequence
  An artificially synthesized sequence
QVQLQESGPGLVRCSQTLSLTCTVSGYSITSDHAWSWVRQPPGRGLEWIGYISYSGITTYNPSLKSRVTMLRDTSKNQFSLRLSSVTAADTAVYYCARSLARTTAMDYWGQGSLVTVSS

SEQ ID NO: 31 - protein, 119 aa, Artificial Sequence
  An artificially synthesized sequence
QVQLQESGPGLVRPCQTLSLTCTVSGYSITSDHAWSWVRQPPGRGLEWIGYISYSGITTYNPSLKSRVTMLRDTSKNQFSLRLSSVTAADTAVYYCARSLARTTAMDYWGQGSLVTVSS

SEQ ID NO: 32 - protein, 119 aa, Artificial Sequence
  An artificially synthesized sequence
QVQLQESGPGLVRPSCTLSLTCTVSGYSITSDHAWSWVRQPPGRGLEWIGYISYSGITTYNPSLKSRVTMLRDTSKNQFSLRLSSVTAADTAVYYCARSLARTTAMDYWGQGSLVTVSS

SEQ ID NO: 33 - protein, 119 aa, Artificial Sequence
  An artificially synthesized sequence
QVQLQESGPGLVRPSQCLSLTCTVSGYSITSDHAWSWVRQPPGRGLEWIGYISYSGITTYNPSLKSRVTMLRDTSKNQFSLRLSSVTAADTAVYYCARSLARTTAMDYWGQGSLVTVSS

SEQ ID NO: 34 - protein, 119 aa, Artificial Sequence
  An artificially synthesized sequence
QVQLQESGPGLVRPSQTCSLTCTVSGYSITSDHAWSWVRQPPGRGLEWIGYISYSGITTYNPSLKSRVTMLRDTSKNQFSLRLSSVTAADTAVYYCARSLARTTAMDYWGQGSLVTVSS

SEQ ID NO: 35 - protein, 119 aa, Artificial Sequence
  An artificially synthesized sequence
QVQLQESGPGLVRPSQTLCLTCTVSGYSITSDHAWSWVRQPPGRGLEWIGYISYSGITTYNPSLKSRVTMLRDTSKNQFSLRLSSVTAADTAVYYCARSLARTTAMDYWGQGSLVTVSS

SEQ ID NO: 36 - protein, 119 aa, Artificial Sequence
  An artificially synthesized sequence
QVQLQESGPGLVRPSQTLSCTCTVSGYSITSDHAWSWVRQPPGRGLEWIGYISYSGITTYNPSLKSRVTMLRDTSKNQFSLRLSSVTAADTAVYYCARSLARTTAMDYWGQGSLVTVSS

SEQ ID NO: 37 - protein, 119 aa, Artificial Sequence
  An artificially synthesized sequence
QVQLQESGPGLVRPSQTLSLCCTVSGYSITSDHAWSWVRQPPGRGLEWIGYISYSGITTYNPSLKSRVTMLRDTSKNQFSLRLSSVTAADTAVYYCARSLARTTAMDYWGQGSLVTVSS

SEQ ID NO: 38 - protein, 119 aa, Artificial Sequence
  An artificially synthesized sequence
QVQLQESGPGLVRPSQTLSLTCCVSGYSITSDHAWSWVRQPPGRGLEWIGYISYSGITTYNPSLKSRVTMLRDTSKNQFSLRLSSVTAADTAVYYCARSLARTTAMDYWGQGSLVTVSS

SEQ ID NO: 39 - protein, 119 aa, Artificial Sequence
  An artificially synthesized sequence
QVQLQESGPGLVRPSQTLSLTCTVCGYSITSDHAWSWVRQPPGRGLEWIGYISYSGITTYNPSLKSRVTMLRDTSKNQFSLRLSSVTAADTAVYYCARSLARTTAMDYWGQGSLVTVSS

SEQ ID NO: 40 - protein, 119 aa, Artificial Sequence
  An artificially synthesized sequence
QVQLQESGPGLVRPSQTLSLTCTVSCYSITSDHAWSWVRQPPGRGLEWIGYISYSGITTYNPSLKSRVTMLRDTSKNQFSLRLSSVTAADTAVYYCARSLARTTAMDYWGQGSLVTVSS

SEQ ID NO: 41 - protein, 119 aa, Artificial Sequence
  An artificially synthesized sequence
QVQLQESGPGLVRPSQTLSLTCTVSGYCITSDHAWSWVRQPPGRGLEWIGYISYSGITTYNPSLKSRVTMLRDTSKNQFSLRLSSVTAADTAVYYCARSLARTTAMDYWGQGSLVTVSS

SEQ ID NO: 42 - protein, 119 aa, Artificial Sequence
  An artificially synthesized sequence
QVQLQESGPGLVRPSQTLSLTCTVSGYSICSDHAWSWVRQPPGRGLEWIGYISYSGITTYNPSLKSRVTMLRDTSKNQFSLRLSSVTAADTAVYYCARSLARTTAMDYWGQGSLVTVSS

SEQ ID NO: 43 - protein, 119 aa, Artificial Sequence
  An artificially synthesized sequence
QVQLQESGPGLVRPSQTLSLTCTVSGYSITSDHAWSWVRQPPGRGLEWIGYISYSGITTYNPSLKSCVTMLRDTSKNQFSLRLSSVTAADTAVYYCARSLARTTAMDYWGQGSLVTVSS

SEQ ID NO: 44 - protein, 119 aa, Artificial Sequence
  An artificially synthesized sequence
QVQLQESGPGLVRPSQTLSLTCTVSGYSITSDHAWSWVRQPPGRGLEWIGYISYSGITTYNPSLKSRCTMLRDTSKNQFSLRLSSVTAADTAVYYCARSLARTTAMDYWGQGSLVTVSS

SEQ ID NO: 45 - protein, 119 aa, Artificial Sequence
  An artificially synthesized sequence
QVQLQESGPGLVRPSQTLSLTCTVSGYSITSDHAWSWVRQPPGRGLEWIGYISYSGITTYNPSLKSRVCMLRDTSKNQFSLRLSSVTAADTAVYYCARSLARTTAMDYWGQGSLVTVSS

SEQ ID NO: 46 - protein, 119 aa, Artificial Sequence
  An artificially synthesized sequence
QVQLQESGPGLVRPSQTLSLTCTVSGYSITSDHAWSWVRQPPGRGLEWIGYISYSGITTYNPSLKSRVTMCRDTSKNQFSLRLSSVTAADTAVYYCARSLARTTAMDYWGQGSLVTVSS

SEQ ID NO: 47 - protein, 119 aa, Artificial Sequence
  An artificially synthesized sequence
QVQLQESGPGLVRPSQTLSLTCTVSGYSITSDHAWSWVRQPPGRGLEWIGYISYSGITTYNPSLKSRVTMLRCTSKNQFSLRLSSVTAADTAVYYCARSLARTTAMDYWGQGSLVTVSS

SEQ ID NO: 48 - protein, 119 aa, Artificial Sequence
  An artificially synthesized sequence
QVQLQESGPGLVRPSQTLSLTCTVSGYSITSDHAWSWVRQPPGRGLEWIGYISYSGITTYNPSLKSRVTMLRDCSKNQFSLRLSSVTAADTAVYYCARSLARTTAMDYWGQGSLVTVSS

SEQ ID NO: 49 - protein, 119 aa, Artificial Sequence
  An artificially synthesized sequence
QVQLQESGPGLVRPSQTLSLTCTVSGYSITSDHAWSWVRQPPGRGLEWIGYISYSGITTYNPSLKSRVTMLRDTCKNQFSLRLSSVTAADTAVYYCARSLARTTAMDYWGQGSLVTVSS

SEQ ID NO: 50 - protein, 119 aa, Artificial Sequence
  An artificially synthesized sequence
QVQLQESGPGLVRPSQTLSLTCTVSGYSITSDHAWSWVRQPPGRGLEWIGYISYSGITTYNPSLKSRVTMLRDTSCNQFSLRLSSVTAADTAVYYCARSLARTTAMDYWGQGSLVTVSS

SEQ ID NO: 51 - protein, 119 aa, Artificial Sequence
  An artificially synthesized sequence
QVQLQESGPGLVRPSQTLSLTCTVSGYSITSDHAWSWVRQPPGRGLEWIGYISYSGITTYNPSLKSRVTMLRDTSKCQFSLRLSSVTAADTAVYYCARSLARTTAMDYWGQGSLVTVSS

SEQ ID NO: 52 - protein, 119 aa, Artificial Sequence
  An artificially synthesized sequence
QVQLQESGPGLVRPSQTLSLTCTVSGYSITSDHAWSWVRQPPGRGLEWIGYISYSGITTYNPSLKSRVTMLRDTSKNCFSLRLSSVTAADTAVYYCARSLARTTAMDYWGQGSLVTVSS

SEQ ID NO: 53 - protein, 119 aa, Artificial Sequence
  An artificially synthesized sequence
QVQLQESGPGLVRPSQTLSLTCTVSGYSITSDHAWSWVRQPPGRGLEWIGYISYSGITTYNPSLKSRVTMLRDTSKNQFCLRLSSVTAADTAVYYCARSLARTTAMDYWGQGSLVTVSS

SEQ ID NO: 54 - protein, 119 aa, Artificial Sequence
  An artificially synthesized sequence
QVQLQESGPGLVRPSQTLSLTCTVSGYSITSDHAWSWVRQPPGRGLEWIGYISYSGITTYNPSLKSRVTMLRDTSKNQFSCRLSSVTAADTAVYYCARSLARTTAMDYWGQGSLVTVSS

SEQ ID NO: 55 - protein, 119 aa, Artificial Sequence
  An artificially synthesized sequence
QVQLQESGPGLVRPSQTLSLTCTVSGYSITSDHAWSWVRQPPGRGLEWIGYISYSGITTYNPSLKSRVTMLRDTSKNQFSLCLSSVTAADTAVYYCARSLARTTAMDYWGQGSLVTVSS

SEQ ID NO: 56 - protein, 119 aa, Artificial Sequence
  An artificially synthesized sequence
QVQLQESGPGLVRPSQTLSLTCTVSGYSITSDHAWSWVRQPPGRGLEWIGYISYSGITTYNPSLKSRVTMLRDTSKNQFSLRCSSVTAADTAVYYCARSLARTTAMDYWGQGSLVTVSS

SEQ ID NO: 57 - protein, 119 aa, Artificial Sequence
  An artificially synthesized sequence
QVQLQESGPGLVRPSQTLSLTCTVSGYSITSDHAWSWVRQPPGRGLEWIGYISYSGITTYNPSLKSRVTMLRDTSKNQFSLRLCSVTAADTAVYYCARSLARTTAMDYWGQGSLVTVSS

SEQ ID NO: 58 - protein, 119 aa, Artificial Sequence
  An artificially synthesized sequence
QVQLQESGPGLVRPSQTLSLTCTVSGYSITSDHAWSWVRQPPGRGLEWIGYISYSGITTYNPSLKSRVTMLRDTSKNQFSLRLSCVTAADTAVYYCARSLARTTAMDYWGQGSLVTVSS

SEQ ID NO: 59 - protein, 119 aa, Artificial Sequence
  An artificially synthesized sequence
QVQLQESGPGLVRPSQTLSLTCTVSGYSITSDHAWSWVRQPPGRGLEWIGYISYSGITTYNPSLKSRVTMLRDTSKNQFSLRLSSCTAADTAVYYCARSLARTTAMDYWGQGSLVTVSS

SEQ ID NO: 60 - protein, 119 aa, Artificial Sequence
  An artificially synthesized sequence
QVQLQESGPGLVRPSQTLSLTCTVSGYSITSDHAWSWVRQPPGRGLEWIGYISYSGITTYNPSLKSRVTMLRDTSKNQFSLRLSSVTAADTAVYYCARSLARTTAMDYWGQGSLVTVCS

SEQ ID NO: 61 - protein, 119 aa, Artificial Sequence
  An artificially synthesized sequence
QVQLQESGPGLVRPSQTLSLTCTVSGYSITSDHAWSWVRQPPGRGLEWIGYISYSGITTYNPSLKSRVTMLRDTSKNQFSLRLSSVTAADTAVYYCARSLARTTAMDYWGQGSLVTVSC

SEQ ID NO: 62 - protein, 119 aa, Artificial Sequence
  An artificially synthesized sequence
QVQLQESGPGLVRPSQTLSLTCTVSGYSITCDHAWSWVRQPPGRGLEWIGYISYSGITTYNPSLKSRVTMLRDTSKNQFSLRLSSVTAADTAVYYCARSLARTTAMDYWGQGSLVTVSS

SEQ ID NO: 63 - protein, 119 aa, Artificial Sequence
  An artificially synthesized sequence
QVQLQESGPGLVRPSQTLSLTCTVSGYSITSDHACSWVRQPPGRGLEWIGYISYSGITTYNPSLKSRVTMLRDTSKNQFSLRLSSVTAADTAVYYCARSLARTTAMDYWGQGSLVTVSS

SEQ ID NO: 64 - protein, 119 aa, Artificial Sequence
  An artificially synthesized sequence
QVQLQESGPGLVRPSQTLSLTCTVSGYSITSDHAWCWVRQPPGRGLEWIGYISYSGITTYNPSLKSRVTMLRDTSKNQFSLRLSSVTAADTAVYYCARSLARTTAMDYWGQGSLVTVSS

SEQ ID NO: 65 - protein, 119 aa, Artificial Sequence
  An artificially synthesized sequence
QVQLQESGPGLVRPSQTLSLTCTVSGYSITSDHAWSWVRQPPGRGLEWIGCISYSGITTYNPSLKSRVTMLRDTSKNQFSLRLSSVTAADTAVYYCARSLARTTAMDYWGQGSLVTVSS

SEQ ID NO: 66 - protein, 119 aa, Artificial Sequence
  An artificially synthesized sequence
QVQLQESGPGLVRPSQTLSLTCTVSGYSITSDHAWSWVRQPPGRGLEWIGYCSYSGITTYNPSLKSRVTMLRDTSKNQFSLRLSSVTAADTAVYYCARSLARTTAMDYWGQGSLVTVSS

SEQ ID NO: 67 - protein, 119 aa, Artificial Sequence
  An artificially synthesized sequence
QVQLQESGPGLVRPSQTLSLTCTVSGYSITSDHAWSWVRQPPGRGLEWIGYICYSGITTYNPSLKSRVTMLRDTSKNQFSLRLSSVTAADTAVYYCARSLARTTAMDYWGQGSLVTVSS

SEQ ID NO: 68 - protein, 119 aa, Artificial Sequence
  An artificially synthesized sequence
QVQLQESGPGLVRPSQTLSLTCTVSGYSITSDHAWSWVRQPPGRGLEWIGYISYSGITTYNPCLKSRVTMLRDTSKNQFSLRLSSVTAADTAVYYCARSLARTTAMDYWGQGSLVTVSS

SEQ ID NO: 69 - protein, 119 aa, Artificial Sequence
  An artificially synthesized sequence
QVQLQESGPGLVRPSQTLSLTCTVSGYSITSDHAWSWVRQPPGRGLEWIGYISYSGITTYNPSCKSRVTMLRDTSKNQFSLRLSSVTAADTAVYYCARSLARTTAMDYWGQGSLVTVSS

SEQ ID NO: 70 - protein, 119 aa, Artificial Sequence
  An artificially synthesized sequence
QVQLQESGPGLVRPSQTLSLTCTVSGYSITSDHAWSWVRQPPGRGLEWIGYISYSGITTYNPSLCSRVTMLRDTSKNQFSLRLSSVTAADTAVYYCARSLARTTAMDYWGQGSLVTVSS

SEQ ID NO: 71 - protein, 119 aa, Artificial Sequence
  An artificially synthesized sequence
QVQLQESGPGLVRPSQTLSLTCTVSGYSITSDHAWSWVRQPPGRGLEWIGYISYSGITTYNPSLKCRVTMLRDTSKNQFSLRLSSVTAADTAVYYCARSLARTTAMDYWGQGSLVTVSS

SEQ ID NO: 72 - protein, 119 aa, Artificial Sequence
  An artificially synthesized sequence
QVQLQESGPGLVRPSQTLSLTCTVSGYSITSDHAWSWVRQPPGRGLEWIGYISYSGITTYNPSLKSRVTMLRDTSKNQFSLRLSSVTAADTAVYYCARSLARTTAMCYWGQGSLVTVSS

SEQ ID NO: 73 - protein, 119 aa, Artificial Sequence
  An artificially synthesized sequence
QVQLQESGPGLVRPSQTLSLTCTVSGYSITSDHAWSWVRQPPGRGLEWIGYISYSGITTYNPSLKSRVTMLRDTSKNQFSLRLSSVTAADTAVYYCARSLARTTAMDCWGQGSLVTVSS

SEQ ID NO: 74 - protein, 328 aa, Artificial Sequence
  An artificially synthesized sequence
CSTKGPSVFPLAPSSKSTSGGTAALGCLVKDYFPEPVTVSWNSGALTSGVHTFPAVLQSSGLYSLSSVVTVPSSSLGTQTYICNVNHKPSNTKVDKRVEPKSCDKTHTCPPCPAPELRRGPSVFLFPPKPKDTLMISRTPEVTCVVVDVSHEDPEVKFNWYVDGVEVHNAKTKPREEQYNSTYRVVSVLTVLHQDWLNGKEYKCKVSNKGLPSSIEKTISKAKGQPREPQVYTLPPSREEMTKNQVSLTCLVKGFYPSDIAVEWESNGQPENNYKTTPPVLDSDGSFFLYSKLTVDKSRWQEGNVFSCSVMHEALHNHYTQKSLSLSP

SEQ ID NO: 75 - protein, 328 aa, Artificial Sequence
  An artificially synthesized sequence
ACTKGPSVFPLAPSSKSTSGGTAALGCLVKDYFPEPVTVSWNSGALTSGVHTFPAVLQSSGLYSLSSVVTVPSSSLGTQTYICNVNHKPSNTKVDKRVEPKSCDKTHTCPPCPAPELRRGPSVFLFPPKPKDTLMISRTPEVTCVVVDVSHEDPEVKFNWYVDGVEVHNAKTKPREEQYNSTYRVVSVLTVLHQDWLNGKEYKCKVSNKGLPSSIEKTISKAKGQPREPQVYTLPPSREEMTKNQVSLTCLVKGFYPSDIAVEWESNGQPENNYKTTPPVLDSDGSFFLYSKLTVDKSRWQEGNVFSCSVMHEALHNHYTQKSLSLSP

SEQ ID NO: 76 - protein, 328 aa, Artificial Sequence
  An artificially synthesized sequence
ASCKGPSVFPLAPSSKSTSGGTAALGCLVKDYFPEPVTVSWNSGALTSGVHTFPAVLQSSGLYSLSSVVTVPSSSLGTQTYICNVNHKPSNTKVDKRVEPKSCDKTHTCPPCPAPELRRGPSVFLFPPKPKDTLMISRTPEVTCVVVDVSHEDPEVKFNWYVDGVEVHNAKTKPREEQYNSTYRVVSVLTVLHQDWLNGKEYKCKVSNKGLPSSIEKTISKAKGQPREPQVYTLPPSREEMTKNQVSLTCLVKGFYPSDIAVEWESNGQPENNYKTTPPVLDSDGSFFLYSKLTVDKSRWQEGNVFSCSVMHEALHNHYTQKSLSLSP

SEQ ID NO: 77 - protein, 328 aa, Artificial Sequence
  An artificially synthesized sequence
ASTCGPSVFPLAPSSKSTSGGTAALGCLVKDYFPEPVTVSWNSGALTSGVHTFPAVLQSSGLYSLSSVVTVPSSSLGTQTYICNVNHKPSNTKVDKRVEPKSCDKTHTCPPCPAPELRRGPSVFLFPPKPKDTLMISRTPEVTCVVVDVSHEDPEVKFNWYVDGVEVHNAKTKPREEQYNSTYRVVSVLTVLHQDWLNGKEYKCKVSNKGLPSSIEKTISKAKGQPREPQVYTLPPSREEMTKNQVSLTCLVKGFYPSDIAVEWESNGQPENNYKTTPPVLDSDGSFFLYSKLTVDKSRWQEGNVFSCSVMHEALHNHYTQKSLSLSP

SEQ ID NO: 78 - protein, 328 aa, Artificial Sequence
  An artificially synthesized sequence
ASTKCPSVFPLAPSSKSTSGGTAALGCLVKDYFPEPVTVSWNSGALTSGVHTFPAVLQSSGLYSLSSVVTVPSSSLGTQTYICNVNHKPSNTKVDKRVEPKSCDKTHTCPPCPAPELRRGPSVFLFPPKPKDTLMISRTPEVTCVVVDVSHEDPEVKFNWYVDGVEVHNAKTKPREEQYNSTYRVVSVLTVLHQDWLNGKEYKCKVSNKGLPSSIEKTISKAKGQPREPQVYTLPPSREEMTKNQVSLTCLVKGFYPSDIAVEWESNGQPENNYKTTPPVLDSDGSFFLYSKLTVDKSRWQEGNVFSCSVMHEALHNHYTQKSLSLSP

SEQ ID NO: 79 - protein, 328 aa, Artificial Sequence
  An artificially synthesized sequence
ASTKGCSVFPLAPSSKSTSGGTAALGCLVKDYFPEPVTVSWNSGALTSGVHTFPAVLQSSGLYSLSSVVTVPSSSLGTQTYICNVNHKPSNTKVDKRVEPKSCDKTHTCPPCPAPELRRGPSVFLFPPKPKDTLMISRTPEVTCVVVDVSHEDPEVKFNWYVDGVEVHNAKTKPREEQYNSTYRVVSVLTVLHQDWLNGKEYKCKVSNKGLPSSIEKTISKAKGQPREPQVYTLPPSREEMTKNQVSLTCLVKGFYPSDIAVEWESNGQPENNYKTTPPVLDSDGSFFLYSKLTVDKSRWQEGNVFSCSVMHEALHNHYTQKSLSLSP

SEQ ID NO: 80 - protein, 328 aa, Artificial Sequence
  An artificially synthesized sequence
ASTKGPCVFPLAPSSKSTSGGTAALGCLVKDYFPEPVTVSWNSGALTSGVHTFPAVLQSSGLYSLSSVVTVPSSSLGTQTYICNVNHKPSNTKVDKRVEPKSCDKTHTCPPCPAPELRRGPSVFLFPPKPKDTLMISRTPEVTCVVVDVSHEDPEVKFNWYVDGVEVHNAKTKPREEQYNSTYRVVSVLTVLHQDWLNGKEYKCKVSNKGLPSSIEKTISKAKGQPREPQVYTLPPSREEMTKNQVSLTCLVKGFYPSDIAVEWESNGQPENNYKTTPPVLDSDGSFFLYSKLTVDKSRWQEGNVFSCSVMHEALHNHYTQKSLSLSP

SEQ ID NO: 81 - protein, 328 aa, Artificial Sequence
  An artificially synthesized sequence
ASTKGPSCFPLAPSSKSTSGGTAALGCLVKDYFPEPVTVSWNSGALTSGVHTFPAVLQSSGLYSLSSVVTVPSSSLGTQTYICNVNHKPSNTKVDKRVEPKSCDKTHTCPPCPAPELRRGPSVFLFPPKPKDTLMISRTPEVTCVVVDVSHEDPEVKFNWYVDGVEVHNAKTKPREEQYNSTYRVVSVLTVLHQDWLNGKEYKCKVSNKGLPSSIEKTISKAKGQPREPQVYTLPPSREEMTKNQVSLTCLVKGFYPSDIAVEWESNGQPENNYKTTPPVLDSDGSFFLYSKLTVDKSRWQEGNVFSCSVMHEALHNHYTQKSLSLSP

SEQ ID NO: 82 - protein, 328 aa, Artificial Sequence
  An artificially synthesized sequence
ASTKGPSVCPLAPSSKSTSGGTAALGCLVKDYFPEPVTVSWNSGALTSGVHTFPAVLQSSGLYSLSSVVTVPSSSLGTQTYICNVNHKPSNTKVDKRVEPKSCDKTHTCPPCPAPELRRGPSVFLFPPKPKDTLMISRTPEVTCVVVDVSHEDPEVKFNWYVDGVEVHNAKTKPREEQYNSTYRVVSVLTVLHQDWLNGKEYKCKVSNKGLPSSIEKTISKAKGQPREPQVYTLPPSREEMTKNQVSLTCLVKGFYPSDIAVEWESNGQPENNYKTTPPVLDSDGSFFLYSKLTVDKSRWQEGNVFSCSVMHEALHNHYTQKSLSLSP

SEQ ID NO: 83 - protein, 328 aa, Artificial Sequence
  An artificially synthesized sequence
ASTKGPSVFCLAPSSKSTSGGTAALGCLVKDYFPEPVTVSWNSGALTSGVHTFPAVLQSSGLYSLSSVVTVPSSSLGTQTYICNVNHKPSNTKVDKRVEPKSCDKTHTCPPCPAPELRRGPSVFLFPPKPKDTLMISRTPEVTCVVVDVSHEDPEVKFNWYVDGVEVHNAKTKPREEQYNSTYRVVSVLTVLHQDWLNGKEYKCKVSNKGLPSSIEKTISKAKGQPREPQVYTLPPSREEMTKNQVSLTCLVKGFYPSDIAVEWESNGQPENNYKTTPPVLDSDGSFFLYSKLTVDKSRWQEGNVFSCSVMHEALHNHYTQKSLSLSP

SEQ ID NO: 84 - protein, 328 aa, Artificial Sequence
  An artificially synthesized sequence
ASTKGPSVFPLAPCSKSTSGGTAALGCLVKDYFPEPVTVSWNSGALTSGVHTFPAVLQSSGLYSLSSVVTVPSSSLGTQTYICNVNHKPSNTKVDKRVEPKSCDKTHTCPPCPAPELRRGPSVFLFPPKPKDTLMISRTPEVTCVVVDVSHEDPEVKFNWYVDGVEVHNAKTKPREEQYNSTYRVVSVLTVLHQDWLNGKEYKCKVSNKGLPSSIEKTISKAKGQPREPQVYTLPPSREEMTKNQVSLTCLVKGFYPSDIAVEWESNGQPENNYKTTPPVLDSDGSFFLYSKLTVDKSRWQEGNVFSCSVMHEALHNHYTQKSLSLSP

SEQ ID NO: 85 - protein, 328 aa, Artificial Sequence
  An artificially synthesized sequence
ASTKGPSVFPLAPSCKSTSGGTAALGCLVKDYFPEPVTVSWNSGALTSGVHTFPAVLQSSGLYSLSSVVTVPSSSLGTQTYICNVNHKPSNTKVDKRVEPKSCDKTHTCPPCPAPELRRGPSVFLFPPKPKDTLMISRTPEVTCVVVDVSHEDPEVKFNWYVDGVEVHNAKTKPREEQYNSTYRVVSVLTVLHQDWLNGKEYKCKVSNKGLPSSIEKTISKAKGQPREPQVYTLPPSREEMTKNQVSLTCLVKGFYPSDIAVEWESNGQPENNYKTTPPVLDSDGSFFLYSKLTVDKSRWQEGNVFSCSVMHEALHNHYTQKSLSLSP

SEQ ID NO: 86 - protein, 328 aa, Artificial Sequence
  An artificially synthesized sequence
ASTKGPSVFPLAPSSCSTSGGTAALGCLVKDYFPEPVTVSWNSGALTSGVHTFPAVLQSSGLYSLSSVVTVPSSSLGTQTYICNVNHKPSNTKVDKRVEPKSCDKTHTCPPCPAPELRRGPSVFLFPPKPKDTLMISRTPEVTCVVVDVSHEDPEVKFNWYVDGVEVHNAKTKPREEQYNSTYRVVSVLTVLHQDWLNGKEYKCKVSNKGLPSSIEKTISKAKGQPREPQVYTLPPSREEMTKNQVSLTCLVKGFYPSDIAVEWESNGQPENNYKTTPPVLDSDGSFFLYSKLTVDKSRWQEGNVFSCSVMHEALHNHYTQKSLSLSP

SEQ ID NO: 87 - protein, 328 aa, Artificial Sequence
  An artificially synthesized sequence
ASTKGPSVFPLAPSSKCTSGGTAALGCLVKDYFPEPVTVSWNSGALTSGVHTFPAVLQSSGLYSLSSVVTVPSSSLGTQTYICNVNHKPSNTKVDKRVEPKSCDKTHTCPPCPAPELRRGPSVFLFPPKPKDTLMISRTPEVTCVVVDVSHEDPEVKFNWYVDGVEVHNAKTKPREEQYNSTYRVVSVLTVLHQDWLNGKEYKCKVSNKGLPSSIEKTISKAKGQPREPQVYTLPPSREEMTKNQVSLTCLVKGFYPSDIAVEWESNGQPENNYKTTPPVLDSDGSFFLYSKLTVDKSRWQEGNVFSCSVMHEALHNHYTQKSLSLSP

SEQ ID NO: 88 - protein, 328 aa, Artificial Sequence
  An artificially synthesized sequence
ASTKGPSVFPLAPSSKSCSGGTAALGCLVKDYFPEPVTVSWNSGALTSGVHTFPAVLQSSGLYSLSSVVTVPSSSLGTQTYICNVNHKPSNTKVDKRVEPKSCDKTHTCPPCPAPELRRGPSVFLFPPKPKDTLMISRTPEVTCVVVDVSHEDPEVKFNWYVDGVEVHNAKTKPREEQYNSTYRVVSVLTVLHQDWLNGKEYKCKVSNKGLPSSIEKTISKAKGQPREPQVYTLPPSREEMTKNQVSLTCLVKGFYPSDIAVEWESNGQPENNYKTTPPVLDSDGSFFLYSKLTVDKSRWQEGNVFSCSVMHEALHNHYTQKSLSLSP

SEQ ID NO: 89 - protein, 328 aa, Artificial Sequence
  An artificially synthesized sequence
ASTKGPSVFPLAPSSKSTCGGTAALGCLVKDYFPEPVTVSWNSGALTSGVHTFPAVLQSSGLYSLSSVVTVPSSSLGTQTYICNVNHKPSNTKVDKRVEPKSCDKTHTCPPCPAPELRRGPSVFLFPPKPKDTLMISRTPEVTCVVVDVSHEDPEVKFNWYVDGVEVHNAKTKPREEQYNSTYRVVSVLTVLHQDWLNGKEYKCKVSNKGLPSSIEKTISKAKGQPREPQVYTLPPSREEMTKNQVSLTCLVKGFYPSDIAVEWESNGQPENNYKTTPPVLDSDGSFFLYSKLTVDKSRWQEGNVFSCSVMHEALHNHYTQKSLSLSP

SEQ ID NO: 90 - protein, 328 aa, Artificial Sequence
  An artificially synthesized sequence
ASTKGPSVFPLAPSSKSTSCGTAALGCLVKDYFPEPVTVSWNSGALTSGVHTFPAVLQSSGLYSLSSVVTVPSSSLGTQTYICNVNHKPSNTKVDKRVEPKSCDKTHTCPPCPAPELRRGPSVFLFPPKPKDTLMISRTPEVTCVVVDVSHEDPEVKFNWYVDGVEVHNAKTKPREEQYNSTYRVVSVLTVLHQDWLNGKEYKCKVSNKGLPSSIEKTISKAKGQPREPQVYTLPPSREEMTKNQVSLTCLVKGFYPSDIAVEWESNGQPENNYKTTPPVLDSDGSFFLYSKLTVDKSRWQEGNVFSCSVMHEALHNHYTQKSLSLSP

SEQ ID NO: 91 - protein, 328 aa, Artificial Sequence
  An artificially synthesized sequence
ASTKGPSVFPLAPSSKSTSGCTAALGCLVKDYFPEPVTVSWNSGALTSGVHTFPAVLQSSGLYSLSSVVTVPSSSLGTQTYICNVNHKPSNTKVDKRVEPKSCDKTHTCPPCPAPELRRGPSVFLFPPKPKDTLMISRTPEVTCVVVDVSHEDPEVKFNWYVDGVEVHNAKTKPREEQYNSTYRVVSVLTVLHQDWLNGKEYKCKVSNKGLPSSIEKTISKAKGQPREPQVYTLPPSREEMTKNQVSLTCLVKGFYPSDIAVEWESNGQPENNYKTTPPVLDSDGSFFLYSKLTVDKSRWQEGNVFSCSVMHEALHNHYTQKSLSLSP

SEQ ID NO: 92 - protein, 328 aa, Artificial Sequence
  An artificially synthesized sequence
ASTKGPSVFPLAPSSKSTSGGCAALGCLVKDYFPEPVTVSWNSGALTSGVHTFPAVLQSSGLYSLSSVVTVPSSSLGTQTYICNVNHKPSNTKVDKRVEPKSCDKTHTCPPCPAPELRRGPSVFLFPPKPKDTLMISRTPEVTCVVVDVSHEDPEVKFNWYVDGVEVHNAKTKPREEQYNSTYRVVSVLTVLHQDWLNGKEYKCKVSNKGLPSSIEKTISKAKGQPREPQVYTLPPSREEMTKNQVSLTCLVKGFYPSDIAVEWESNGQPENNYKTTPPVLDSDGSFFLYSKLTVDKSRWQEGNVFSCSVMHEALHNHYTQKSLSLSP

SEQ ID NO: 93 - protein, 328 aa, Artificial Sequence
  An artificially synthesized sequence
ASTKGPSVFPLAPSSKSTSGGTCALGCLVKDYFPEPVTVSWNSGALTSGVHTFPAVLQSSGLYSLSSVVTVPSSSLGTQTYICNVNHKPSNTKVDKRVEPKSCDKTHTCPPCPAPELRRGPSVFLFPPKPKDTLMISRTPEVTCVVVDVSHEDPEVKFNWYVDGVEVHNAKTKPREEQYNSTYRVVSVLTVLHQDWLNGKEYKCKVSNKGLPSSIEKTISKAKGQPREPQVYTLPPSREEMTKNQVSLTCLVKGFYPSDIAVEWESNGQPENNYKTTPPVLDSDGSFFLYSKLTVDKSRWQEGNVFSCSVMHEALHNHYTQKSLSLSP

SEQ ID NO: 94 - protein, 328 aa, Artificial Sequence
  An artificially synthesized sequence
ASTKGPSVFPLAPSSKSTSGGTACLGCLVKDYFPEPVTVSWNSGALTSGVHTFPAVLQSSGLYSLSSVVTVPSSSLGTQTYICNVNHKPSNTKVDKRVEPKSCDKTHTCPPCPAPELRRGPSVFLFPPKPKDTLMISRTPEVTCVVVDVSHEDPEVKFNWYVDGVEVHNAKTKPREEQYNSTYRVVSVLTVLHQDWLNGKEYKCKVSNKGLPSSIEKTISKAKGQPREPQVYTLPPSREEMTKNQVSLTCLVKGFYPSDIAVEWESNGQPENNYKTTPPVLDSDGSFFLYSKLTVDKSRWQEGNVFSCSVMHEALHNHYTQKSLSLSP

SEQ ID NO: 95 - protein, 328 aa, Artificial Sequence
  An artificially synthesized sequence
ASTKGPSVFPLAPSSKSTSGGTAALGCLVKCYFPEPVTVSWNSGALTSGVHTFPAVLQSSGLYSLSSVVTVPSSSLGTQTYICNVNHKPSNTKVDKRVEPKSCDKTHTCPPCPAPELRRGPSVFLFPPKPKDTLMISRTPEVTCVVVDVSHEDPEVKFNWYVDGVEVHNAKTKPREEQYNSTYRVVSVLTVLHQDWLNGKEYKCKVSNKGLPSSIEKTISKAKGQPREPQVYTLPPSREEMTKNQVSLTCLVKGFYPSDIAVEWESNGQPENNYKTTPPVLDSDGSFFLYSKLTVDKSRWQEGNVFSCSVMHEALHNHYTQKSLSLSP

SEQ ID NO: 96 - protein, 328 aa, Artificial Sequence
  An artificially synthesized sequence
ASTKGPSVFPLAPSSKSTSGGTAALGCLVKDCFPEPVTVSWNSGALTSGVHTFPAVLQSSGLYSLSSVVTVPSSSLGTQTYICNVNHKPSNTKVDKRVEPKSCDKTHTCPPCPAPELRRGPSVFLFPPKPKDTLMISRTPEVTCVVVDVSHEDPEVKFNWYVDGVEVHNAKTKPREEQYNSTYRVVSVLTVLHQDWLNGKEYKCKVSNKGLPSSIEKTISKAKGQPREPQVYTLPPSREEMTKNQVSLTCLVKGFYPSDIAVEWESNGQPENNYKTTPPVLDSDGSFFLYSKLTVDKSRWQEGNVFSCSVMHEALHNHYTQKSLSLSP

SEQ ID NO: 97 - protein, 328 aa, Artificial Sequence
  An artificially synthesized sequence
ASTKGPSVFPLAPSSKSTSGGTAALGCLVKDYCPEPVTVSWNSGALTSGVHTFPAVLQSSGLYSLSSVVTVPSSSLGTQTYICNVNHKPSNTKVDKRVEPKSCDKTHTCPPCPAPELRRGPSVFLFPPKPKDTLMISRTPEVTCVVVDVSHEDPEVKFNWYVDGVEVHNAKTKPREEQYNSTYRVVSVLTVLHQDWLNGKEYKCKVSNKGLPSSIEKTISKAKGQPREPQVYTLPPSREEMTKNQVSLTCLVKGFYPSDIAVEWESNGQPENNYKTTPPVLDSDGSFFLYSKLTVDKSRWQEGNVFSCSVMHEALHNHYTQKSLSLSP

SEQ ID NO: 98 - protein, 328 aa, Artificial Sequence
  An artificially synthesized sequence
ASTKGPSVFPLAPSSKSTSGGTAALGCLVKDYFCEPVTVSWNSGALTSGVHTFPAVLQSSGLYSLSSVVTVPSSSLGTQTYICNVNHKPSNTKVDKRVEPKSCDKTHTCPPCPAPELRRGPSVFLFPPKPKDTLMISRTPEVTCVVVDVSHEDPEVKFNWYVDGVEVHNAKTKPREEQYNSTYRVVSVLTVLHQDWLNGKEYKCKVSNKGLPSSIEKTISKAKGQPREPQVYTLPPSREEMTKNQVSLTCLVKGFYPSDIAVEWESNGQPENNYKTTPPVLDSDGSFFLYSKLTVDKSRWQEGNVFSCSVMHEALHNHYTQKSLSLSP

SEQ ID NO: 99 - protein, 328 aa, Artificial Sequence
  An artificially synthesized sequence
ASTKGPSVFPLAPSSKSTSGGTAALGCLVKDYFPCPVTVSWNSGALTSGVHTFPAVLQSSGLYSLSSVVTVPSSSLGTQTYICNVNHKPSNTKVDKRVEPKSCDKTHTCPPCPAPELRRGPSVFLFPPKPKDTLMISRTPEVTCVVVDVSHEDPEVKFNWYVDGVEVHNAKTKPREEQYNSTYRVVSVLTVLHQDWLNGKEYKCKVSNKGLPSSIEKTISKAKGQPREPQVYTLPPSREEMTKNQVSLTCLVKGFYPSDIAVEWESNGQPENNYKTTPPVLDSDGSFFLYSKLTVDKSRWQEGNVFSCSVMHEALHNHYTQKSLSLSP

SEQ ID NO: 100 - protein, 328 aa, Artificial Sequence
  An artificially synthesized sequence
ASTKGPSVFPLAPSSKSTSGGTAALGCLVKDYFPECVTVSWNSGALTSGVHTFPAVLQSSGLYSLSSVVTVPSSSLGTQTYICNVNHKPSNTKVDKRVEPKSCDKTHTCPPCPAPELRRGPSVFLFPPKPKDTLMISRTPEVTCVVVDVSHEDPEVKFNWYVDGVEVHNAKTKPREEQYNSTYRVVSVLTVLHQDWLNGKEYKCKVSNKGLPSSIEKTISKAKGQPREPQVYTLPPSREEMTKNQVSLTCLVKGFYPSDIAVEWESNGQPENNYKTTPPVLDSDGSFFLYSKLTVDKSRWQEGNVFSCSVMHEALHNHYTQKSLSLSP

SEQ ID NO: 101 - protein, 328 aa, Artificial Sequence
  An artificially synthesized sequence
ASTKGPSVFPLAPSSKSTSGGTAALGCLVKDYFPEPCTVSWNSGALTSGVHTFPAVLQSSGLYSLSSVVTVPSSSLGTQTYICNVNHKPSNTKVDKRVEPKSCDKTHTCPPCPAPELRRGPSVFLFPPKPKDTLMISRTPEVTCVVVDVSHEDPEVKFNWYVDGVEVHNAKTKPREEQYNSTYRVVSVLTVLHQDWLNGKEYKCKVSNKGLPSSIEKTISKAKGQPREPQVYTLPPSREEMTKNQVSLTCLVKGFYPSDIAVEWESNGQPENNYKTTPPVLDSDGSFFLYSKLTVDKSRWQEGNVFSCSVMHEALHNHYTQKSLSLSP

SEQ ID NO: 102 - protein, 328 aa, Artificial Sequence
  An artificially synthesized sequence
ASTKGPSVFPLAPSSKSTSGGTAALGCLVKDYFPEPVCVSWNSGALTSGVHTFPAVLQSSGLYSLSSVVTVPSSSLGTQTYICNVNHKPSNTKVDKRVEPKSCDKTHTCPPCPAPELRRGPSVFLFPPKPKDTLMISRTPEVTCVVVDVSHEDPEVKFNWYVDGVEVHNAKTKPREEQYNSTYRVVSVLTVLHQDWLNGKEYKCKVSNKGLPSSIEKTISKAKGQPREPQVYTLPPSREEMTKNQVSLTCLVKGFYPSDIAVEWESNGQPENNYKTTPPVLDSDGSFFLYSKLTVDKSRWQEGNVFSCSVMHEALHNHYTQKSLSLSP

SEQ ID NO: 103 - protein, 328 aa, Artificial Sequence
  An artificially synthesized sequence
ASTKGPSVFPLAPSSKSTSGGTAALGCLVKDYFPEPVTCSWNSGALTSGVHTFPAVLQSSGLYSLSSVVTVPSSSLGTQTYICNVNHKPSNTKVDKRVEPKSCDKTHTCPPCPAPELRRGPSVFLFPPKPKDTLMISRTPEVTCVVVDVSHEDPEVKFNWYVDGVEVHNAKTKPREEQYNSTYRVVSVLTVLHQDWLNGKEYKCKVSNKGLPSSIEKTISKAKGQPREPQVYTLPPSREEMTKNQVSLTCLVKGFYPSDIAVEWESNGQPENNYKTTPPVLDSDGSFFLYSKLTVDKSRWQEGNVFSCSVMHEALHNHYTQKSLSLSP

SEQ ID NO: 104 - protein, 328 aa, Artificial Sequence
  An artificially synthesized sequence
ASTKGPSVFPLAPSSKSTSGGTAALGCLVKDYFPEPVTVCWNSGALTSGVHTFPAVLQSSGLYSLSSVVTVPSSSLGTQTYICNVNHKPSNTKVDKRVEPKSCDKTHTCPPCPAPELRRGPSVFLFPPKPKDTLMISRTPEVTCVVVDVSHEDPEVKFNWYVDGVEVHNAKTKPREEQYNSTYRVVSVLTVLHQDWLNGKEYKCKVSNKGLPSSIEKTISKAKGQPREPQVYTLPPSREEMTKNQVSLTCLVKGFYPSDIAVEWESNGQPENNYKTTPPVLDSDGSFFLYSKLTVDKSRWQEGNVFSCSVMHEALHNHYTQKSLSLSP

SEQ ID NO: 105 - protein, 328 aa, Artificial Sequence
  An artificially synthesized sequence
ASTKGPSVFPLAPSSKSTSGGTAALGCLVKDYFPEPVTVSCNSGALTSGVHTFPAVLQSSGLYSLSSVVTVPSSSLGTQTYICNVNHKPSNTKVDKRVEPKSCDKTHTCPPCPAPELRRGPSVFLFPPKPKDTLMISRTPEVTCVVVDVSHEDPEVKFNWYVDGVEVHNAKTKPREEQYNSTYRVVSVLTVLHQDWLNGKEYKCKVSNKGLPSSIEKTISKAKGQPREPQVYTLPPSREEMTKNQVSLTCLVKGFYPSDIAVEWESNGQPENNYKTTPPVLDSDGSFFLYSKLTVDKSRWQEGNVFSCSVMHEALHNHYTQKSLSLSP

SEQ ID NO: 106 - protein, 328 aa, Artificial Sequence
  An artificially synthesized sequence
ASTKGPSVFPLAPSSKSTSGGTAALGCLVKDYFPEPVTVSWCSGALTSGVHTFPAVLQSSGLYSLSSVVTVPSSSLGTQTYICNVNHKPSNTKVDKRVEPKSCDKTHTCPPCPAPELRRGPSVFLFPPKPKDTLMISRTPEVTCVVVDVSHEDPEVKFNWYVDGVEVHNAKTKPREEQYNSTYRVVSVLTVLHQDWLNGKEYKCKVSNKGLPSSIEKTISKAKGQPREPQVYTLPPSREEMTKNQVSLTCLVKGFYPSDIAVEWESNGQPENNYKTTPPVLDSDGSFFLYSKLTVDKSRWQEGNVFSCSVMHEALHNHYTQKSLSLSP

SEQ ID NO: 107 - protein, 328 aa, Artificial Sequence
  An artificially synthesized sequence
ASTKGPSVFPLAPSSKSTSGGTAALGCLVKDYFPEPVTVSWNCGALTSGVHTFPAVLQSSGLYSLSSVVTVPSSSLGTQTYICNVNHKPSNTKVDKRVEPKSCDKTHTCPPCPAPELRRGPSVFLFPPKPKDTLMISRTPEVTCVVVDVSHEDPEVKFNWYVDGVEVHNAKTKPREEQYNSTYRVVSVLTVLHQDWLNGKEYKCKVSNKGLPSSIEKTISKAKGQPREPQVYTLPPSREEMTKNQVSLTCLVKGFYPSDIAVEWESNGQPENNYKTTPPVLDSDGSFFLYSKLTVDKSRWQEGNVFSCSVMHEALHNHYTQKSLSLSP

SEQ ID NO: 108 - protein, 328 aa, Artificial Sequence
  An artificially synthesized sequence
ASTKGPSVFPLAPSSKSTSGGTAALGCLVKDYFPEPVTVSWNSCALTSGVHTFPAVLQSSGLYSLSSVVTVPSSSLGTQTYICNVNHKPSNTKVDKRVEPKSCDKTHTCPPCPAPELRRGPSVFLFPPKPKDTLMISRTPEVTCVVVDVSHEDPEVKFNWYVDGVEVHNAKTKPREEQYNSTYRVVSVLTVLHQDWLNGKEYKCKVSNKGLPSSIEKTISKAKGQPREPQVYTLPPSREEMTKNQVSLTCLVKGFYPSDIAVEWESNGQPENNYKTTPPVLDSDGSFFLYSKLTVDKSRWQEGNVFSCSVMHEALHNHYTQKSLSLSP

SEQ ID NO: 109 - protein, 328 aa, Artificial Sequence
  An artificially synthesized sequence
ASTKGPSVFPLAPSSKSTSGGTAALGCLVKDYFPEPVTVSWNSGCLTSGVHTFPAVLQSSGLYSLSSVVTVPSSSLGTQTYICNVNHKPSNTKVDKRVEPKSCDKTHTCPPCPAPELRRGPSVFLFPPKPKDTLMISRTPEVTCVVVDVSHEDPEVKFNWYVDGVEVHNAKTKPREEQYNSTYRVVSVLTVLHQDWLNGKEYKCKVSNKGLPSSIEKTISKAKGQPREPQVYTLPPSREEMTKNQVSLTCLVKGFYPSDIAVEWESNGQPENNYKTTPPVLDSDGSFFLYSKLTVDKSRWQEGNVFSCSVMHEALHNHYTQKSLSLSP

SEQ ID NO: 110 - protein, 328 aa, Artificial Sequence
  An artificially synthesized sequence
ASTKGPSVFPLAPSSKSTSGGTAALGCLVKDYFPEPVTVSWNSGACTSGVHTFPAVLQSSGLYSLSSVVTVPSSSLGTQTYICNVNHKPSNTKVDKRVEPKSCDKTHTCPPCPAPELRRGPSVFLFPPKPKDTLMISRTPEVTCVVVDVSHEDPEVKFNWYVDGVEVHNAKTKPREEQYNSTYRVVSVLTVLHQDWLNGKEYKCKVSNKGLPSSIEKTISKAKGQPREPQVYTLPPSREEMTKNQVSLTCLVKGFYPSDIAVEWESNGQPENNYKTTPPVLDSDGSFFLYSKLTVDKSRWQEGNVFSCSVMHEALHNHYTQKSLSLSP

SEQ ID NO: 111 - protein, 328 aa, Artificial Sequence
  An artificially synthesized sequence
ASTKGPSVFPLAPSSKSTSGGTAALGCLVKDYFPEPVTVSWNSGALCSGVHTFPAVLQSSGLYSLSSVVTVPSSSLGTQTYICNVNHKPSNTKVDKRVEPKSCDKTHTCPPCPAPELRRGPSVFLFPPKPKDTLMISRTPEVTCVVVDVSHEDPEVKFNWYVDGVEVHNAKTKPREEQYNSTYRVVSVLTVLHQDWLNGKEYKCKVSNKGLPSSIEKTISKAKGQPREPQVYTLPPSREEMTKNQVSLTCLVKGFYPSDIAVEWESNGQPENNYKTTPPVLDSDGSFFLYSKLTVDKSRWQEGNVFSCSVMHEALHNHYTQKSLSLSP

SEQ ID NO: 112 - protein, 328 aa, Artificial Sequence
  An artificially synthesized sequence
ASTKGPSVFPLAPSSKSTSGGTAALGCLVKDYFPEPVTVSWNSGALTCGVHTFPAVLQSSGLYSLSSVVTVPSSSLGTQTYICNVNHKPSNTKVDKRVEPKSCDKTHTCPPCPAPELRRGPSVFLFPPKPKDTLMISRTPEVTCVVVDVSHEDPEVKFNWYVDGVEVHNAKTKPREEQYNSTYRVVSVLTVLHQDWLNGKEYKCKVSNKGLPSSIEKTISKAKGQPREPQVYTLPPSREEMTKNQVSLTCLVKGFYPSDIAVEWESNGQPENNYKTTPPVLDSDGSFFLYSKLTVDKSRWQEGNVFSCSVMHEALHNHYTQKSLSLSP

SEQ ID NO: 113 - protein, 328 aa, Artificial Sequence
  An artificially synthesized sequence
ASTKGPSVFPLAPSSKSTSGGTAALGCLVKDYFPEPVTVSWNSGALTSCVHTFPAVLQSSGLYSLSSVVTVPSSSLGTQTYICNVNHKPSNTKVDKRVEPKSCDKTHTCPPCPAPELRRGPSVFLFPPKPKDTLMISRTPEVTCVVVDVSHEDPEVKFNWYVDGVEVHNAKTKPREEQYNSTYRVVSVLTVLHQDWLNGKEYKCKVSNKGLPSSIEKTISKAKGQPREPQVYTLPPSREEMTKNQVSLTCLVKGFYPSDIAVEWESNGQPENNYKTTPPVLDSDGSFFLYSKLTVDKSRWQEGNVFSCSVMHEALHNHYTQKSLSLSP

SEQ ID NO: 114 - protein, 328 aa, Artificial Sequence
  An artificially synthesized sequence
ASTKGPSVFPLAPSSKSTSGGTAALGCLVKDYFPEPVTVSWNSGALTSGCHTFPAVLQSSGLYSLSSVVTVPSSSLGTQTYICNVNHKPSNTKVDKRVEPKSCDKTHTCPPCPAPELRRGPSVFLFPPKPKDTLMISRTPEVTCVVVDVSHEDPEVKFNWYVDGVEVHNAKTKPREEQYNSTYRVVSVLTVLHQDWLNGKEYKCKVSNKGLPSSIEKTISKAKGQPREPQVYTLPPSREEMTKNQVSLTCLVKGFYPSDIAVEWESNGQPENNYKTTPPVLDSDGSFFLYSKLTVDKSRWQEGNVFSCSVMHEALHNHYTQKSLSLSP

SEQ ID NO: 115 - protein, 328 aa, Artificial Sequence
  An artificially synthesized sequence
ASTKGPSVFPLAPSSKSTSGGTAALGCLVKDYFPEPVTVSWNSGALTSGVHTFPACLQSSGLYSLSSVVTVPSSSLGTQTYICNVNHKPSNTKVDKRVEPKSCDKTHTCPPCPAPELRRGPSVFLFPPKPKDTLMISRTPEVTCVVVDVSHEDPEVKFNWYVDGVEVHNAKTKPREEQYNSTYRVVSVLTVLHQDWLNGKEYKCKVSNKGLPSSIEKTISKAKGQPREPQVYTLPPSREEMTKNQVSLTCLVKGFYPSDIAVEWESNGQPENNYKTTPPVLDSDGSFFLYSKLTVDKSRWQEGNVFSCSVMHEALHNHYTQKSLSLSP

SEQ ID NO: 116 - protein, 328 aa, Artificial Sequence
  An artificially synthesized sequence
ASTKGPSVFPLAPSSKSTSGGTAALGCLVKDYFPEPVTVSWNSGALTSGVHTFPAVCQSSGLYSLSSVVTVPSSSLGTQTYICNVNHKPSNTKVDKRVEPKSCDKTHTCPPCPAPELRRGPSVFLFPPKPKDTLMISRTPEVTCVVVDVSHEDPEVKFNWYVDGVEVHNAKTKPREEQYNSTYRVVSVLTVLHQDWLNGKEYKCKVSNKGLPSSIEKTISKAKGQPREPQVYTLPPSREEMTKNQVSLTCLVKGFYPSDIAVEWESNGQPENNYKTTPPVLDSDGSFFLYSKLTVDKSRWQEGNVFSCSVMHEALHNHYTQKSLSLSP

SEQ ID NO: 117 - protein, 328 aa, Artificial Sequence
  An artificially synthesized sequence
ASTKGPSVFPLAPSSKSTSGGTAALGCLVKDYFPEPVTVSWNSGALTSGVHTFPAVLCSSGLYSLSSVVTVPSSSLGTQTYICNVNHKPSNTKVDKRVEPKSCDKTHTCPPCPAPELRRGPSVFLFPPKPKDTLMISRTPEVTCVVVDVSHEDPEVKFNWYVDGVEVHNAKTKPREEQYNSTYRVVSVLTVLHQDWLNGKEYKCKVSNKGLPSSIEKTISKAKGQPREPQVYTLPPSREEMTKNQVSLTCLVKGFYPSDIAVEWESNGQPENNYKTTPPVLDSDGSFFLYSKLTVDKSRWQEGNVFSCSVMHEALHNHYTQKSLSLSP

SEQ ID NO: 118 - protein, 328 aa, Artificial Sequence
  An artificially synthesized sequence
ASTKGPSVFPLAPSSKSTSGGTAALGCLVKDYFPEPVTVSWNSGALTSGVHTFPAVLQCSGLYSLSSVVTVPSSSLGTQTYICNVNHKPSNTKVDKRVEPKSCDKTHTCPPCPAPELRRGPSVFLFPPKPKDTLMISRTPEVTCVVVDVSHEDPEVKFNWYVDGVEVHNAKTKPREEQYNSTYRVVSVLTVLHQDWLNGKEYKCKVSNKGLPSSIEKTISKAKGQPREPQVYTLPPSREEMTKNQVSLTCLVKGFYPSDIAVEWESNGQPENNYKTTPPVLDSDGSFFLYSKLTVDKSRWQEGNVFSCSVMHEALHNHYTQKSLSLSP

SEQ ID NO: 119 - protein, 328 aa, Artificial Sequence
  An artificially synthesized sequence
ASTKGPSVFPLAPSSKSTSGGTAALGCLVKDYFPEPVTVSWNSGALTSGVHTFPAVLQSCGLYSLSSVVTVPSSSLGTQTYICNVNHKPSNTKVDKRVEPKSCDKTHTCPPCPAPELRRGPSVFLFPPKPKDTLMISRTPEVTCVVVDVSHEDPEVKFNWYVDGVEVHNAKTKPREEQYNSTYRVVSVLTVLHQDWLNGKEYKCKVSNKGLPSSIEKTISKAKGQPREPQVYTLPPSREEMTKNQVSLTCLVKGFYPSDIAVEWESNGQPENNYKTTPPVLDSDGSFFLYSKLTVDKSRWQEGNVFSCSVMHEALHNHYTQKSLSLSP

SEQ ID NO: 120 - protein, 328 aa, Artificial Sequence
  An artificially synthesized sequence
ASTKGPSVFPLAPSSKSTSGGTAALGCLVKDYFPEPVTVSWNSGALTSGVHTFPAVLQSSCLYSLSSVVTVPSSSLGTQTYICNVNHKPSNTKVDKRVEPKSCDKTHTCPPCPAPELRRGPSVFLFPPKPKDTLMISRTPEVTCVVVDVSHEDPEVKFNWYVDGVEVHNAKTKPREEQYNSTYRVVSVLTVLHQDWLNGKEYKCKVSNKGLPSSIEKTISKAKGQPREPQVYTLPPSREEMTKNQVSLTCLVKGFYPSDIAVEWESNGQPENNYKTTPPVLDSDGSFFLYSKLTVDKSRWQEGNVFSCSVMHEALHNHYTQKSLSLSP

SEQ ID NO: 121 - protein, 328 aa, Artificial Sequence
  An artificially synthesized sequence
ASTKGPSVFPLAPSSKSTSGGTAALGCLVKDYFPEPVTVSWNSGALTSGVHTFPAVLQSSGCYSLSSVVTVPSSSLGTQTYICNVNHKPSNTKVDKRVEPKSCDKTHTCPPCPAPELRRGPSVFLFPPKPKDTLMISRTPEVTCVVVDVSHEDPEVKFNWYVDGVEVHNAKTKPREEQYNSTYRVVSVLTVLHQDWLNGKEYKCKVSNKGLPSSIEKTISKAKGQPREPQVYTLPPSREEMTKNQVSLTCLVKGFYPSDIAVEWESNGQPENNYKTTPPVLDSDGSFFLYSKLTVDKSRWQEGNVFSCSVMHEALHNHYTQKSLSLSP

SEQ ID NO: 122 - protein, 328 aa, Artificial Sequence
  An artificially synthesized sequence
ASTKGPSVFPLAPSSKSTSGGTAALGCLVKDYFPEPVTVSWNSGALTSGVHTFPAVLQSSGLCSLSSVVTVPSSSLGTQTYICNVNHKPSNTKVDKRVEPKSCDKTHTCPPCPAPELRRGPSVFLFPPKPKDTLMISRTPEVTCVVVDVSHEDPEVKFNWYVDGVEVHNAKTKPREEQYNSTYRVVSVLTVLHQDWLNGKEYKCKVSNKGLPSSIEKTISKAKGQPREPQVYTLPPSREEMTKNQVSLTCLVKGFYPSDIAVEWESNGQPENNYKTTPPVLDSDGSFFLYSKLTVDKSRWQEGNVFSCSVMHEALHNHYTQKSLSLSP

SEQ ID NO: 123 - protein, 328 aa, Artificial Sequence
  An artificially synthesized sequence
ASTKGPSVFPLAPSSKSTSGGTAALGCLVKDYFPEPVTVSWNSGALTSGVHTFPAVLQSSGLYSLSSVCTVPSSSLGTQTYICNVNHKPSNTKVDKRVEPKSCDKTHTCPPCPAPELRRGPSVFLFPPKPKDTLMISRTPEVTCVVVDVSHEDPEVKFNWYVDGVEVHNAKTKPREEQYNSTYRVVSVLTVLHQDWLNGKEYKCKVSNKGLPSSIEKTISKAKGQPREPQVYTLPPSREEMTKNQVSLTCLVKGFYPSDIAVEWESNGQPENNYKTTPPVLDSDGSFFLYSKLTVDKSRWQEGNVFSCSVMHEALHNHYTQKSLSLSP

SEQ ID NO: 124 - protein, 328 aa, Artificial Sequence
  An artificially synthesized sequence
ASTKGPSVFPLAPSSKSTSGGTAALGCLVKDYFPEPVTVSWNSGALTSGVHTFPAVLQSSGLYSLSSVVCVPSSSLGTQTYICNVNHKPSNTKVDKRVEPKSCDKTHTCPPCPAPELRRGPSVFLFPPKPKDTLMISRTPEVTCVVVDVSHEDPEVKFNWYVDGVEVHNAKTKPREEQYNSTYRVVSVLTVLHQDWLNGKEYKCKVSNKGLPSSIEKTISKAKGQPREPQVYTLPPSREEMTKNQVSLTCLVKGFYPSDIAVEWESNGQPENNYKTTPPVLDSDGSFFLYSKLTVDKSRWQEGNVFSCSVMHEALHNHYTQKSLSLSP

SEQ ID NO: 125 - protein, 328 aa, Artificial Sequence
  An artificially synthesized sequence
ASTKGPSVFPLAPSSKSTSGGTAALGCLVKDYFPEPVTVSWNSGALTSGVHTFPAVLQSSGLYSLSSVVTCPSSSLGTQTYICNVNHKPSNTKVDKRVEPKSCDKTHTCPPCPAPELRRGPSVFLFPPKPKDTLMISRTPEVTCVVVDVSHEDPEVKFNWYVDGVEVHNAKTKPREEQYNSTYRVVSVLTVLHQDWLNGKEYKCKVSNKGLPSSIEKTISKAKGQPREPQVYTLPPSREEMTKNQVSLTCLVKGFYPSDIAVEWESNGQPENNYKTTPPVLDSDGSFFLYSKLTVDKSRWQEGNVFSCSVMHEALHNHYTQKSLSLSP

SEQ ID NO: 126 - protein, 328 aa, Artificial Sequence
  An artificially synthesized sequence
ASTKGPSVFPLAPSSKSTSGGTAALGCLVKDYFPEPVTVSWNSGALTSGVHTFPAVLQSSGLYSLSSVVTVCSSSLGTQTYICNVNHKPSNTKVDKRVEPKSCDKTHTCPPCPAPELRRGPSVFLFPPKPKDTLMISRTPEVTCVVVDVSHEDPEVKFNWYVDGVEVHNAKTKPREEQYNSTYRVVSVLTVLHQDWLNGKEYKCKVSNKGLPSSIEKTISKAKGQPREPQVYTLPPSREEMTKNQVSLTCLVKGFYPSDIAVEWESNGQPENNYKTTPPVLDSDGSFFLYSKLTVDKSRWQEGNVFSCSVMHEALHNHYTQKSLSLSP

SEQ ID NO: 127 - protein, 328 aa, Artificial Sequence
  An artificially synthesized sequence
ASTKGPSVFPLAPSSKSTSGGTAALGCLVKDYFPEPVTVSWNSGALTSGVHTFPAVLQSSGLYSLSSVVTVPCSSLGTQTYICNVNHKPSNTKVDKRVEPKSCDKTHTCPPCPAPELRRGPSVFLFPPKPKDTLMISRTPEVTCVVVDVSHEDPEVKFNWYVDGVEVHNAKTKPREEQYNSTYRVVSVLTVLHQDWLNGKEYKCKVSNKGLPSSIEKTISKAKGQPREPQVYTLPPSREEMTKNQVSLTCLVKGFYPSDIAVEWESNGQPENNYKTTPPVLDSDGSFFLYSKLTVDKSRWQEGNVFSCSVMHEALHNHYTQKSLSLSP

SEQ ID NO: 128 - protein, 328 aa, Artificial Sequence
  An artificially synthesized sequence
ASTKGPSVFPLAPSSKSTSGGTAALGCLVKDYFPEPVTVSWNSGALTSGVHTFPAVLQSSGLYSLSSVVTVPSCSLGTQTYICNVNHKPSNTKVDKRVEPKSCDKTHTCPPCPAPELRRGPSVFLFPPKPKDTLMISRTPEVTCVVVDVSHEDPEVKFNWYVDGVEVHNAKTKPREEQYNSTYRVVSVLTVLHQDWLNGKEYKCKVSNKGLPSSIEKTISKAKGQPREPQVYTLPPSREEMTKNQVSLTCLVKGFYPSDIAVEWESNGQPENNYKTTPPVLDSDGSFFLYSKLTVDKSRWQEGNVFSCSVMHEALHNHYTQKSLSLSP

SEQ ID NO: 129 - protein, 328 aa, Artificial Sequence
  An artificially synthesized sequence
ASTKGPSVFPLAPSSKSTSGGTAALGCLVKDYFPEPVTVSWNSGALTSGVHTFPAVLQSSGLYSLSSVVTVPSSCLGTQTYICNVNHKPSNTKVDKRVEPKSCDKTHTCPPCPAPELRRGPSVFLFPPKPKDTLMISRTPEVTCVVVDVSHEDPEVKFNWYVDGVEVHNAKTKPREEQYNSTYRVVSVLTVLHQDWLNGKEYKCKVSNKGLPSSIEKTISKAKGQPREPQVYTLPPSREEMTKNQVSLTCLVKGFYPSDIAVEWESNGQPENNYKTTPPVLDSDGSFFLYSKLTVDKSRWQEGNVFSCSVMHEALHNHYTQKSLSLSP

SEQ ID NO: 130 - protein, 328 aa, Artificial Sequence
  An artificially synthesized sequence
ASTKGPSVFPLAPSSKSTSGGTAALGCLVKDYFPEPVTVSWNSGALTSGVHTFPAVLQSSGLYSLSSVVTVPSSSCGTQTYICNVNHKPSNTKVDKRVEPKSCDKTHTCPPCPAPELRRGPSVFLFPPKPKDTLMISRTPEVTCVVVDVSHEDPEVKFNWYVDGVEVHNAKTKPREEQYNSTYRVVSVLTVLHQDWLNGKEYKCKVSNKGLPSSIEKTISKAKGQPREPQVYTLPPSREEMTKNQVSLTCLVKGFYPSDIAVEWESNGQPENNYKTTPPVLDSDGSFFLYSKLTVDKSRWQEGNVFSCSVMHEALHNHYTQKSLSLSP

SEQ ID NO: 131 - protein, 328 aa, Artificial Sequence
  An artificially synthesized sequence
ASTKGPSVFPLAPSSKSTSGGTAALGCLVKDYFPEPVTVSWNSGALTSGVHTFPAVLQSSGLYSLSSVVTVPSSSLCTQTYICNVNHKPSNTKVDKRVEPKSCDKTHTCPPCPAPELRRGPSVFLFPPKPKDTLMISRTPEVTCVVVDVSHEDPEVKFNWYVDGVEVHNAKTKPREEQYNSTYRVVSVLTVLHQDWLNGKEYKCKVSNKGLPSSIEKTISKAKGQPREPQVYTLPPSREEMTKNQVSLTCLVKGFYPSDIAVEWESNGQPENNYKTTPPVLDSDGSFFLYSKLTVDKSRWQEGNVFSCSVMHEALHNHYTQKSLSLSP

SEQ ID NO: 132 - protein, 328 aa, Artificial Sequence
  An artificially synthesized sequence
ASTKGPSVFPLAPSSKSTSGGTAALGCLVKDYFPEPVTVSWNSGALTSGVHTFPAVLQSSGLYSLSSVVTVPSSSLGCQTYICNVNHKPSNTKVDKRVEPKSCDKTHTCPPCPAPELRRGPSVFLFPPKPKDTLMISRTPEVTCVVVDVSHEDPEVKFNWYVDGVEVHNAKTKPREEQYNSTYRVVSVLTVLHQDWLNGKEYKCKVSNKGLPSSIEKTISKAKGQPREPQVYTLPPSREEMTKNQVSLTCLVKGFYPSDIAVEWESNGQPENNYKTTPPVLDSDGSFFLYSKLTVDKSRWQEGNVFSCSVMHEALHNHYTQKSLSLSP

SEQ ID NO: 133 - protein, 328 aa, Artificial Sequence
  An artificially synthesized sequence
ASTKGPSVFPLAPSSKSTSGGTAALGCLVKDYFPEPVTVSWNSGALTSGVHTFPAVLQSSGLYSLSSVVTVPSSSLGTCTYICNVNHKPSNTKVDKRVEPKSCDKTHTCPPCPAPELRRGPSVFLFPPKPKDTLMISRTPEVTCVVVDVSHEDPEVKFNWYVDGVEVHNAKTKPREEQYNSTYRVVSVLTVLHQDWLNGKEYKCKVSNKGLPSSIEKTISKAKGQPREPQVYTLPPSREEMTKNQVSLTCLVKGFYPSDIAVEWESNGQPENNYKTTPPVLDSDGSFFLYSKLTVDKSRWQEGNVFSCSVMHEALHNHYTQKSLSLSP

SEQ ID NO: 134 - protein, 328 aa, Artificial Sequence
  An artificially synthesized sequence
ASTKGPSVFPLAPSSKSTSGGTAALGCLVKDYFPEPVTVSWNSGALTSGVHTFPAVLQSSGLYSLSSVVTVPSSSLGTQCYICNVNHKPSNTKVDKRVEPKSCDKTHTCPPCPAPELRRGPSVFLFPPKPKDTLMISRTPEVTCVVVDVSHEDPEVKFNWYVDGVEVHNAKTKPREEQYNSTYRVVSVLTVLHQDWLNGKEYKCKVSNKGLPSSIEKTISKAKGQPREPQVYTLPPSREEMTKNQVSLTCLVKGFYPSDIAVEWESNGQPENNYKTTPPVLDSDGSFFLYSKLTVDKSRWQEGNVFSCSVMHEALHNHYTQKSLSLSP

SEQ ID NO: 135 - protein, 328 aa, Artificial Sequence
  An artificially synthesized sequence
ASTKGPSVFPLAPSSKSTSGGTAALGCLVKDYFPEPVTVSWNSGALTSGVHTFPAVLQSSGLYSLSSVVTVPSSSLGTQTCICNVNHKPSNTKVDKRVEPKSCDKTHTCPPCPAPELRRGPSVFLFPPKPKDTLMISRTPEVTCVVVDVSHEDPEVKFNWYVDGVEVHNAKTKPREEQYNSTYRVVSVLTVLHQDWLNGKEYKCKVSNKGLPSSIEKTISKAKGQPREPQVYTLPPSREEMTKNQVSLTCLVKGFYPSDIAVEWESNGQPENNYKTTPPVLDSDGSFFLYSKLTVDKSRWQEGNVFSCSVMHEALHNHYTQKSLSLSP

SEQ ID NO: 136 - protein, 328 aa, Artificial Sequence
  An artificially synthesized sequence
ASTKGPSVFPLAPSSKSTSGGTAALGCLVKDYFPEPVTVSWNSGALTSGVHTFPAVLQSSGLYSLSSVVTVPSSSLGTQTYCCNVNHKPSNTKVDKRVEPKSCDKTHTCPPCPAPELRRGPSVFLFPPKPKDTLMISRTPEVTCVVVDVSHEDPEVKFNWYVDGVEVHNAKTKPREEQYNSTYRVVSVLTVLHQDWLNGKEYKCKVSNKGLPSSIEKTISKAKGQPREPQVYTLPPSREEMTKNQVSLTCLVKGFYPSDIAVEWESNGQPENNYKTTPPVLDSDGSFFLYSKLTVDKSRWQEGNVFSCSVMHEALHNHYTQKSLSLSP

SEQ ID NO: 137 - protein, 328 aa, Artificial Sequence
  An artificially synthesized sequence
ASTKGPSVFPLAPSSKSTSGGTAALGCLVKDYFPEPVTVSWNSGALTSGVHTFPAVLQSSGLYSLSSVVTVPSSSLGTQTYICCVNHKPSNTKVDKRVEPKSCDKTHTCPPCPAPELRRGPSVFLFPPKPKDTLMISRTPEVTCVVVDVSHEDPEVKFNWYVDGVEVHNAKTKPREEQYNSTYRVVSVLTVLHQDWLNGKEYKCKVSNKGLPSSIEKTISKAKGQPREPQVYTLPPSREEMTKNQVSLTCLVKGFYPSDIAVEWESNGQPENNYKTTPPVLDSDGSFFLYSKLTVDKSRWQEGNVFSCSVMHEALHNHYTQKSLSLSP

SEQ ID NO: 138 - protein, 328 aa, Artificial Sequence
  An artificially synthesized sequence
ASTKGPSVFPLAPSSKSTSGGTAALGCLVKDYFPEPVTVSWNSGALTSGVHTFPAVLQSSGLYSLSSVVTVPSSSLGTQTYICNCNHKPSNTKVDKRVEPKSCDKTHTCPPCPAPELRRGPSVFLFPPKPKDTLMISRTPEVTCVVVDVSHEDPEVKFNWYVDGVEVHNAKTKPREEQYNSTYRVVSVLTVLHQDWLNGKEYKCKVSNKGLPSSIEKTISKAKGQPREPQVYTLPPSREEMTKNQVSLTCLVKGFYPSDIAVEWESNGQPENNYKTTPPVLDSDGSFFLYSKLTVDKSRWQEGNVFSCSVMHEALHNHYTQKSLSLSP

SEQ ID NO: 139 - protein, 328 aa, Artificial Sequence
  An artificially synthesized sequence
ASTKGPSVFPLAPSSKSTSGGTAALGCLVKDYFPEPVTVSWNSGALTSGVHTFPAVLQSSGLYSLSSVVTVPSSSLGTQTYICNVCHKPSNTKVDKRVEPKSCDKTHTCPPCPAPELRRGPSVFLFPPKPKDTLMISRTPEVTCVVVDVSHEDPEVKFNWYVDGVEVHNAKTKPREEQYNSTYRVVSVLTVLHQDWLNGKEYKCKVSNKGLPSSIEKTISKAKGQPREPQVYTLPPSREEMTKNQVSLTCLVKGFYPSDIAVEWESNGQPENNYKTTPPVLDSDGSFFLYSKLTVDKSRWQEGNVFSCSVMHEALHNHYTQKSLSLSP

SEQ ID NO: 140 - protein, 328 aa, Artificial Sequence
  An artificially synthesized sequence
ASTKGPSVFPLAPSSKSTSGGTAALGCLVKDYFPEPVTVSWNSGALTSGVHTFPAVLQSSGLYSLSSVVTVPSSSLGTQTYICNVNCKPSNTKVDKRVEPKSCDKTHTCPPCPAPELRRGPSVFLFPPKPKDTLMISRTPEVTCVVVDVSHEDPEVKFNWYVDGVEVHNAKTKPREEQYNSTYRVVSVLTVLHQDWLNGKEYKCKVSNKGLPSSIEKTISKAKGQPREPQVYTLPPSREEMTKNQVSLTCLVKGFYPSDIAVEWESNGQPENNYKTTPPVLDSDGSFFLYSKLTVDKSRWQEGNVFSCSVMHEALHNHYTQKSLSLSP

SEQ ID NO: 141 - protein, 328 aa, Artificial Sequence
  An artificially synthesized sequence
ASTKGPSVFPLAPSSKSTSGGTAALGCLVKDYFPEPVTVSWNSGALTSGVHTFPAVLQSSGLYSLSSVVTVPSSSLGTQTYICNVNHCPSNTKVDKRVEPKSCDKTHTCPPCPAPELRRGPSVFLFPPKPKDTLMISRTPEVTCVVVDVSHEDPEVKFNWYVDGVEVHNAKTKPREEQYNSTYRVVSVLTVLHQDWLNGKEYKCKVSNKGLPSSIEKTISKAKGQPREPQVYTLPPSREEMTKNQVSLTCLVKGFYPSDIAVEWESNGQPENNYKTTPPVLDSDGSFFLYSKLTVDKSRWQEGNVFSCSVMHEALHNHYTQKSLSLSP

SEQ ID NO: 142 - protein, 328 aa, Artificial Sequence
  An artificially synthesized sequence
ASTKGPSVFPLAPSSKSTSGGTAALGCLVKDYFPEPVTVSWNSGALTSGVHTFPAVLQSSGLYSLSSVVTVPSSSLGTQTYICNVNHKCSNTKVDKRVEPKSCDKTHTCPPCPAPELRRGPSVFLFPPKPKDTLMISRTPEVTCVVVDVSHEDPEVKFNWYVDGVEVHNAKTKPREEQYNSTYRVVSVLTVLHQDWLNGKEYKCKVSNKGLPSSIEKTISKAKGQPREPQVYTLPPSREEMTKNQVSLTCLVKGFYPSDIAVEWESNGQPENNYKTTPPVLDSDGSFFLYSKLTVDKSRWQEGNVFSCSVMHEALHNHYTQKSLSLSP

SEQ ID NO: 143 - protein, 328 aa, Artificial Sequence
  An artificially synthesized sequence
ASTKGPSVFPLAPSSKSTSGGTAALGCLVKDYFPEPVTVSWNSGALTSGVHTFPAVLQSSGLYSLSSVVTVPSSSLGTQTYICNVNHKPCNTKVDKRVEPKSCDKTHTCPPCPAPELRRGPSVFLFPPKPKDTLMISRTPEVTCVVVDVSHEDPEVKFNWYVDGVEVHNAKTKPREEQYNSTYRVVSVLTVLHQDWLNGKEYKCKVSNKGLPSSIEKTISKAKGQPREPQVYTLPPSREEMTKNQVSLTCLVKGFYPSDIAVEWESNGQPENNYKTTPPVLDSDGSFFLYSKLTVDKSRWQEGNVFSCSVMHEALHNHYTQKSLSLSP

SEQ ID NO: 144 - protein, 328 aa, Artificial Sequence
  An artificially synthesized sequence
ASTKGPSVFPLAPSSKSTSGGTAALGCLVKDYFPEPVTVSWNSGALTSGVHTFPAVLQSSGLYSLSSVVTVPSSSLGTQTYICNVNHKPSCTKVDKRVEPKSCDKTHTCPPCPAPELRRGPSVFLFPPKPKDTLMISRTPEVTCVVVDVSHEDPEVKFNWYVDGVEVHNAKTKPREEQYNSTYRVVSVLTVLHQDWLNGKEYKCKVSNKGLPSSIEKTISKAKGQPREPQVYTLPPSREEMTKNQVSLTCLVKGFYPSDIAVEWESNGQPENNYKTTPPVLDSDGSFFLYSKLTVDKSRWQEGNVFSCSVMHEALHNHYTQKSLSLSP

SEQ ID NO: 145 - protein, 328 aa, Artificial Sequence
  An artificially synthesized sequence
ASTKGPSVFPLAPSSKSTSGGTAALGCLVKDYFPEPVTVSWNSGALTSGVHTFPAVLQSSGLYSLSSVVTVPSSSLGTQTYICNVNHKPSNCKVDKRVEPKSCDKTHTCPPCPAPELRRGPSVFLFPPKPKDTLMISRTPEVTCVVVDVSHEDPEVKFNWYVDGVEVHNAKTKPREEQYNSTYRVVSVLTVLHQDWLNGKEYKCKVSNKGLPSSIEKTISKAKGQPREPQVYTLPPSREEMTKNQVSLTCLVKGFYPSDIAVEWESNGQPENNYKTTPPVLDSDGSFFLYSKLTVDKSRWQEGNVFSCSVMHEALHNHYTQKSLSLSP

SEQ ID NO: 146 - protein, 328 aa, Artificial Sequence
  An artificially synthesized sequence
ASTKGPSVFPLAPSSKSTSGGTAALGCLVKDYFPEPVTVSWNSGALTSGVHTFPAVLQSSGLYSLSSVVTVPSSSLGTQTYICNVNHKPSNTCVDKRVEPKSCDKTHTCPPCPAPELRRGPSVFLFPPKPKDTLMISRTPEVTCVVVDVSHEDPEVKFNWYVDGVEVHNAKTKPREEQYNSTYRVVSVLTVLHQDWLNGKEYKCKVSNKGLPSSIEKTISKAKGQPREPQVYTLPPSREEMTKNQVSLTCLVKGFYPSDIAVEWESNGQPENNYKTTPPVLDSDGSFFLYSKLTVDKSRWQEGNVFSCSVMHEALHNHYTQKSLSLSP

SEQ ID NO: 147 - protein, 328 aa, Artificial Sequence
  An artificially synthesized sequence
ASTKGPSVFPLAPSSKSTSGGTAALGCLVKDYFPEPVTVSWNSGALTSGVHTFPAVLQSSGLYSLSSVVTVPSSSLGTQTYICNVNHKPSNTKCDKRVEPKSCDKTHTCPPCPAPELRRGPSVFLFPPKPKDTLMISRTPEVTCVVVDVSHEDPEVKFNWYVDGVEVHNAKTKPREEQYNSTYRVVSVLTVLHQDWLNGKEYKCKVSNKGLPSSIEKTISKAKGQPREPQVYTLPPSREEMTKNQVSLTCLVKGFYPSDIAVEWESNGQPENNYKTTPPVLDSDGSFFLYSKLTVDKSRWQEGNVFSCSVMHEALHNHYTQKSLSLSP

SEQ ID NO: 148 - protein, 328 aa, Artificial Sequence
  An artificially synthesized sequence
ASTKGPSVFPLAPSSKSTSGGTAALGCLVKDYFPEPVTVSWNSGALTSGVHTFPAVLQSSGLYSLSSVVTVPSSSLGTQTYICNVNHKPSNTKVCKRVEPKSCDKTHTCPPCPAPELRRGPSVFLFPPKPKDTLMISRTPEVTCVVVDVSHEDPEVKFNWYVDGVEVHNAKTKPREEQYNSTYRVVSVLTVLHQDWLNGKEYKCKVSNKGLPSSIEKTISKAKGQPREPQVYTLPPSREEMTKNQVSLTCLVKGFYPSDIAVEWESNGQPENNYKTTPPVLDSDGSFFLYSKLTVDKSRWQEGNVFSCSVMHEALHNHYTQKSLSLSP

SEQ ID NO: 149 - protein, 328 aa, Artificial Sequence
  An artificially synthesized sequence
ASTKGPSVFPLAPSSKSTSGGTAALGCLVKDYFPEPVTVSWNSGALTSGVHTFPAVLQSSGLYSLSSVVTVPSSSLGTQTYICNVNHKPSNTKVDCRVEPKSCDKTHTCPPCPAPELRRGPSVFLFPPKPKDTLMISRTPEVTCVVVDVSHEDPEVKFNWYVDGVEVHNAKTKPREEQYNSTYRVVSVLTVLHQDWLNGKEYKCKVSNKGLPSSIEKTISKAKGQPREPQVYTLPPSREEMTKNQVSLTCLVKGFYPSDIAVEWESNGQPENNYKTTPPVLDSDGSFFLYSKLTVDKSRWQEGNVFSCSVMHEALHNHYTQKSLSLSP

SEQ ID NO: 150 - protein, 328 aa, Artificial Sequence
  An artificially synthesized sequence
ASTKGPSVFPLAPSSKSTSGGTAALGCLVKDYFPEPVTVSWNSGALTSGVHTFPAVLQSSGLYSLSSVVTVPSSSLGTQTYICNVNHKPSNTKVDKCVEPKSCDKTHTCPPCPAPELRRGPSVFLFPPKPKDTLMISRTPEVTCVVVDVSHEDPEVKFNWYVDGVEVHNAKTKPREEQYNSTYRVVSVLTVLHQDWLNGKEYKCKVSNKGLPSSIEKTISKAKGQPREPQVYTLPPSREEMTKNQVSLTCLVKGFYPSDIAVEWESNGQPENNYKTTPPVLDSDGSFFLYSKLTVDKSRWQEGNVFSCSVMHEALHNHYTQKSLSLSP

SEQ ID NO: 151 - protein, 328 aa, Artificial Sequence
  An artificially synthesized sequence
ASTKGPSVFPLAPSSKSTSGGTAALGCLVKDYFPEPVTVSWNSGALTSGVHTFPAVLQSSGLYSLSSVVTVPSSSLGTQTYICNVNHKPSNTKVDKRCEPKSCDKTHTCPPCPAPELRRGPSVFLFPPKPKDTLMISRTPEVTCVVVDVSHEDPEVKFNWYVDGVEVHNAKTKPREEQYNSTYRVVSVLTVLHQDWLNGKEYKCKVSNKGLPSSIEKTISKAKGQPREPQVYTLPPSREEMTKNQVSLTCLVKGFYPSDIAVEWESNGQPENNYKTTPPVLDSDGSFFLYSKLTVDKSRWQEGNVFSCSVMHEALHNHYTQKSLSLSP

SEQ ID NO: 152 - protein, 328 aa, Artificial Sequence
  An artificially synthesized sequence
ASTKGPSVFPLAPSSKSTSGGTAALGCLVKDYFPEPVTVSWNSGALTSGVHTFPAVLQSSGLYSLSSVVTVPSSSLGTQTYICNVNHKPSNTKVDKRVCPKSCDKTHTCPPCPAPELRRGPSVFLFPPKPKDTLMISRTPEVTCVVVDVSHEDPEVKFNWYVDGVEVHNAKTKPREEQYNSTYRVVSVLTVLHQDWLNGKEYKCKVSNKGLPSSIEKTISKAKGQPREPQVYTLPPSREEMTKNQVSLTCLVKGFYPSDIAVEWESNGQPENNYKTTPPVLDSDGSFFLYSKLTVDKSRWQEGNVFSCSVMHEALHNHYTQKSLSLSP

SEQ ID NO: 153 - protein, 328 aa, Artificial Sequence
  An artificially synthesized sequence
ASTKGPSVFPLAPSSKSTSGGTAALGCLVKDYFPEPVTVSWNSGALTSGVHTFPAVLQSSGLYSLSSVVTVPSSSLGTQTYICNVNHKPSNTKVDKRVECKSCDKTHTCPPCPAPELRRGPSVFLFPPKPKDTLMISRTPEVTCVVVDVSHEDPEVKFNWYVDGVEVHNAKTKPREEQYNSTYRVVSVLTVLHQDWLNGKEYKCKVSNKGLPSSIEKTISKAKGQPREPQVYTLPPSREEMTKNQVSLTCLVKGFYPSDIAVEWESNGQPENNYKTTPPVLDSDGSFFLYSKLTVDKSRWQEGNVFSCSVMHEALHNHYTQKSLSLSP

SEQ ID NO: 154 - protein, 328 aa, Artificial Sequence
  An artificially synthesized sequence
ASTKGPSVFPLAPSSKSTSGGTAALGCLVKDYFPEPVTVSWNSGALTSGVHTFPAVLQSSGLYSLSSVVTVPSSSLGTQTYICNVNHKPSNTKVDKRVEPCSCDKTHTCPPCPAPELRRGPSVFLFPPKPKDTLMISRTPEVTCVVVDVSHEDPEVKFNWYVDGVEVHNAKTKPREEQYNSTYRVVSVLTVLHQDWLNGKEYKCKVSNKGLPSSIEKTISKAKGQPREPQVYTLPPSREEMTKNQVSLTCLVKGFYPSDIAVEWESNGQPENNYKTTPPVLDSDGSFFLYSKLTVDKSRWQEGNVFSCSVMHEALHNHYTQKSLSLSP

SEQ ID NO: 155 - protein, 328 aa, Artificial Sequence
  An artificially synthesized sequence
ASTKGPSVFPLAPSSKSTSGGTAALGCLVKDYFPEPVTVSWNSGALTSGVHTFPAVLQSSGLYSLSSVVTVPSSSLGTQTYICNVNHKPSNTKVDKRVEPKCCDKTHTCPPCPAPELRRGPSVFLFPPKPKDTLMISRTPEVTCVVVDVSHEDPEVKFNWYVDGVEVHNAKTKPREEQYNSTYRVVSVLTVLHQDWLNGKEYKCKVSNKGLPSSIEKTISKAKGQPREPQVYTLPPSREEMTKNQVSLTCLVKGFYPSDIAVEWESNGQPENNYKTTPPVLDSDGSFFLYSKLTVDKSRWQEGNVFSCSVMHEALHNHYTQKSLSLSP

SEQ ID NO: 156 - protein, 107 aa, Artificial Sequence
  An artificially synthesized sequence
DIQMCQSPSSLSASVGDRVTITCRASQDISSYLNWYQQKPGKAPKLLIYYTSRLHSGVPSRFSGSGSGTDFTFTISSLQPEDIATYYCQQGNTLPYTFGQGTKVEIK

SEQ ID NO: 157 - protein, 107 aa, Artificial Sequence
  An artificially synthesized sequence
DIQMTCSPSSLSASVGDRVTITCRASQDISSYLNWYQQKPGKAPKLLIYYTSRLHSGVPSRFSGSGSGTDFTFTISSLQPEDIATYYCQQGNTLPYTFGQGTKVEIK

SEQ ID NO: 158 - protein, 107 aa, Artificial Sequence
  An artificially synthesized sequence
DIQMTQCPSSLSASVGDRVTITCRASQDISSYLNWYQQKPGKAPKLLIYYTSRLHSGVPSRFSGSGSGTDFTFTISSLQPEDIATYYCQQGNTLPYTFGQGTKVEIK

SEQ ID NO: 159 - protein, 107 aa, Artificial Sequence
  An artificially synthesized sequence
DIQMTQSCSSLSASVGDRVTITCRASQDISSYLNWYQQKPGKAPKLLIYYTSRLHSGVPSRFSGSGSGTDFTFTISSLQPEDIATYYCQQGNTLPYTFGQGTKVEIK

SEQ ID NO: 160 - protein, 107 aa, Artificial Sequence
  An artificially synthesized sequence
DIQMTQSPCSLSASVGDRVTITCRASQDISSYLNWYQQKPGKAPKLLIYYTSRLHSGVPSRFSGSGSGTDFTFTISSLQPEDIATYYCQQGNTLPYTFGQGTKVEIK

SEQ ID NO: 161 - protein, 107 aa, Artificial Sequence
  An artificially synthesized sequence
DIQMTQSPSCLSASVGDRVTITCRASQDISSYLNWYQQKPGKAPKLLIYYTSRLHSGVPSRFSGSGSGTDFTFTISSLQPEDIATYYCQQGNTLPYTFGQGTKVEIK

SEQ ID NO: 162 - protein, 107 aa, Artificial Sequence
  An artificially synthesized sequence
DIQMTQSPSSCSASVGDRVTITCRASQDISSYLNWYQQKPGKAPKLLIYYTSRLHSGVPSRFSGSGSGTDFTFTISSLQPEDIATYYCQQGNTLPYTFGQGTKVEIK

SEQ ID NO: 163 - protein, 107 aa, Artificial Sequence
  An artificially synthesized sequence
DIQMTQSPSSLCASVGDRVTITCRASQDISSYLNWYQQKPGKAPKLLIYYTSRLHSGVPSRFSGSGSGTDFTFTISSLQPEDIATYYCQQGNTLPYTFGQGTKVEIK

SEQ ID NO: 164 - protein, 107 aa, Artificial Sequence
  An artificially synthesized sequence
DIQMTQSPSSLSCSVGDRVTITCRASQDISSYLNWYQQKPGKAPKLLIYYTSRLHSGVPSRFSGSGSGTDFTFTISSLQPEDIATYYCQQGNTLPYTFGQGTKVEIK

SEQ ID NO: 165 - protein, 107 aa, Artificial Sequence
  An artificially synthesized sequence
DIQMTQSPSSLSACVGDRVTITCRASQDISSYLNWYQQKPGKAPKLLIYYTSRLHSGVPSRFSGSGSGTDFTFTISSLQPEDIATYYCQQGNTLPYTFGQGTKVEIK

SEQ ID NO: 166 - protein, 107 aa, Artificial Sequence
  An artificially synthesized sequence
DIQMTQSPSSLSASCGDRVTITCRASQDISSYLNWYQQKPGKAPKLLIYYTSRLHSGVPSRFSGSGSGTDFTFTISSLQPEDIATYYCQQGNTLPYTFGQGTKVEIK

SEQ ID NO: 167 - protein, 107 aa, Artificial Sequence
  An artificially synthesized sequence
DIQMTQSPSSLSASVCDRVTITCRASQDISSYLNWYQQKPGKAPKLLIYYTSRLHSGVPSRFSGSGSGTDFTFTISSLQPEDIATYYCQQGNTLPYTFGQGTKVEIK

SEQ ID NO: 168 - protein, 107 aa, Artificial Sequence
  An artificially synthesized sequence
DIQMTQSPSSLSASVGCRVTITCRASQDISSYLNWYQQKPGKAPKLLIYYTSRLHSGVPSRFSGSGSGTDFTFTISSLQPEDIATYYCQQGNTLPYTFGQGTKVEIK

SEQ ID NO: 169 - protein, 107 aa, Artificial Sequence
  An artificially synthesized sequence
DIQMTQSPSSLSASVGDCVTITCRASQDISSYLNWYQQKPGKAPKLLIYYTSRLHSGVPSRFSGSGSGTDFTFTISSLQPEDIATYYCQQGNTLPYTFGQGTKVEIK

SEQ ID NO: 170 - protein, 107 aa, Artificial Sequence
  An artificially synthesized sequence
DIQMTQSPSSLSASVGDRCTITCRASQDISSYLNWYQQKPGKAPKLLIYYTSRLHSGVPSRFSGSGSGTDFTFTISSLQPEDIATYYCQQGNTLPYTFGQGTKVEIK

SEQ ID NO: 171 - protein, 107 aa, Artificial Sequence
  An artificially synthesized sequence
DIQMTQSPSSLSASVGDRVCITCRASQDISSYLNWYQQKPGKAPKLLIYYTSRLHSGVPSRFSGSGSGTDFTFTISSLQPEDIATYYCQQGNTLPYTFGQGTKVEIK

SEQ ID NO: 172 - protein, 107 aa, Artificial Sequence
  An artificially synthesized sequence
DIQMTQSPSSLSASVGDRVTCTCRASQDISSYLNWYQQKPGKAPKLLIYYTSRLHSGVPSRFSGSGSGTDFTFTISSLQPEDIATYYCQQGNTLPYTFGQGTKVEIK

SEQ ID NO: 173 - protein, 107 aa, Artificial Sequence
  An artificially synthesized sequence
DIQMTQSPSSLSASVGDRVTICCRASQDISSYLNWYQQKPGKAPKLLIYYTSRLHSGVPSRFSGSGSGTDFTFTISSLQPEDIATYYCQQGNTLPYTFGQGTKVEIK

SEQ ID NO: 174 - protein, 107 aa, Artificial Sequence
  An artificially synthesized sequence
DIQMTQSPSSLSASVGDRVTITCRASQDISSYLNWYQQKPGKAPKLLIYYTSRLHSCVPSRFSGSGSGTDFTFTISSLQPEDIATYYCQQGNTLPYTFGQGTKVEIK

SEQ ID NO: 175 - protein, 107 aa, Artificial Sequence
  An artificially synthesized sequence
DIQMTQSPSSLSASVGDRVTITCRASQDISSYLNWYQQKPGKAPKLLIYYTSRLHSGCPSRFSGSGSGTDFTFTISSLQPEDIATYYCQQGNTLPYTFGQGTKVEIK

SEQ ID NO: 176 - protein, 107 aa, Artificial Sequence
  An artificially synthesized sequence
DIQMTQSPSSLSASVGDRVTITCRASQDISSYLNWYQQKPGKAPKLLIYYTSRLHSGVCSRFSGSGSGTDFTFTISSLQPEDIATYYCQQGNTLPYTFGQGTKVEIK

SEQ ID NO: 177 - protein, 107 aa, Artificial Sequence
  An artificially synthesized sequence
DIQMTQSPSSLSASVGDRVTITCRASQDISSYLNWYQQKPGKAPKLLIYYTSRLHSGVPCRFSGSGSGTDFTFTISSLQPEDIATYYCQQGNTLPYTFGQGTKVEIK

SEQ ID NO: 178 - protein, 107 aa, Artificial Sequence
  An artificially synthesized sequence
DIQMTQSPSSLSASVGDRVTITCRASQDISSYLNWYQQKPGKAPKLLIYYTSRLHSGVPSCFSGSGSGTDFTFTISSLQPEDIATYYCQQGNTLPYTFGQGTKVEIK

SEQ ID NO: 179 - protein, 107 aa, Artificial Sequence
  An artificially synthesized sequence
DIQMTQSPSSLSASVGDRVTITCRASQDISSYLNWYQQKPGKAPKLLIYYTSRLHSGVPSRCSGSGSGTDFTFTISSLQPEDIATYYCQQGNTLPYTFGQGTKVEIK

SEQ ID NO: 180 - protein, 107 aa, Artificial Sequence
  An artificially synthesized sequence
DIQMTQSPSSLSASVGDRVTITCRASQDISSYLNWYQQKPGKAPKLLIYYTSRLHSGVPSRFCGSGSGTDFTFTISSLQPEDIATYYCQQGNTLPYTFGQGTKVEIK

SEQ ID NO: 181 - protein, 107 aa, Artificial Sequence
  An artificially synthesized sequence
DIQMTQSPSSLSASVGDRVTITCRASQDISSYLNWYQQKPGKAPKLLIYYTSRLHSGVPSRFSGCGSGTDFTFTISSLQPEDIATYYCQQGNTLPYTFGQGTKVEIK

SEQ ID NO: 182 - protein, 107 aa, Artificial Sequence
  An artificially synthesized sequence
DIQMTQSPSSLSASVGDRVTITCRASQDISSYLNWYQQKPGKAPKLLIYYTSRLHSGVPSRFSGSGCGTDFTFTISSLQPEDIATYYCQQGNTLPYTFGQGTKVEIK

SEQ ID NO: 183 - protein, 107 aa, Artificial Sequence
  An artificially synthesized sequence
DIQMTQSPSSLSASVGDRVTITCRASQDISSYLNWYQQKPGKAPKLLIYYTSRLHSGVPSRFSGSGSCTDFTFTISSLQPEDIATYYCQQGNTLPYTFGQGTKVEIK

SEQ ID NO: 184 - protein, 107 aa, Artificial Sequence
  An artificially synthesized sequence
DIQMTQSPSSLSASVGDRVTITCRASQDISSYLNWYQQKPGKAPKLLIYYTSRLHSGVPSRFSGSGSGCDFTFTISSLQPEDIATYYCQQGNTLPYTFGQGTKVEIK

SEQ ID NO: 185 - protein, 107 aa, Artificial Sequence
  An artificially synthesized sequence
DIQMTQSPSSLSASVGDRVTITCRASQDISSYLNWYQQKPGKAPKLLIYYTSRLHSGVPSRFSGSGSGTCFTFTISSLQPEDIATYYCQQGNTLPYTFGQGTKVEIK

SEQ ID NO: 186 - protein, 107 aa, Artificial Sequence
  An artificially synthesized sequence
DIQMTQSPSSLSASVGDRVTITCRASQDISSYLNWYQQKPGKAPKLLIYYTSRLHSGVPSRFSGSGSGTDFCFTISSLQPEDIATYYCQQGNTLPYTFGQGTKVEIK

SEQ ID NO: 187 - protein, 107 aa, Artificial Sequence
  An artificially synthesized sequence
DIQMTQSPSSLSASVGDRVTITCRASQDISSYLNWYQQKPGKAPKLLIYYTSRLHSGVPSRFSGSGSGTDFTCTISSLQPEDIATYYCQQGNTLPYTFGQGTKVEIK

SEQ ID NO: 188 - protein, 107 aa, Artificial Sequence
  An artificially synthesized sequence
DIQMTQSPSSLSASVGDRVTITCRASQDISSYLNWYQQKPGKAPKLLIYYTSRLHSGVPSRFSGSGSGTDFTFCISSLQPEDIATYYCQQGNTLPYTFGQGTKVEIK

SEQ ID NO: 189 - protein, 107 aa, Artificial Sequence
  An artificially synthesized sequence
DIQMTQSPSSLSASVGDRVTITCRASQDISSYLNWYQQKPGKAPKLLIYYTSRLHSGVPSRFSGSGSGTDFTFTCSSLQPEDIATYYCQQGNTLPYTFGQGTKVEIK

SEQ ID NO: 190 - protein, 107 aa, Artificial Sequence
  An artificially synthesized sequence
DIQMTQSPSSLSASVGDRVTITCRASQDISSYLNWYQQKPGKAPKLLIYYTSRLHSGVPSRFSGSGSGTDFTFTICSLQPEDIATYYCQQGNTLPYTFGQGTKVEIK

SEQ ID NO: 191 - protein, 107 aa, Artificial Sequence
  An artificially synthesized sequence
DIQMTQSPSSLSASVGDRVTITCRASQDISSYLNWYQQKPGKAPKLLIYYTSRLHSGVPSRFSGSGSGTDFTFTISCLQPEDIATYYCQQGNTLPYTFGQGTKVEIK

SEQ ID NO: 192 - protein, 107 aa, Artificial Sequence
  An artificially synthesized sequence
DIQMTQSPSSLSASVGDRVTITCRASQDISSYLNWYQQKPGKAPKLLIYYTSRLHSGVPSRFSGSGSGTDFTFTISSCQPEDIATYYCQQGNTLPYTFGQGTKVEIK

SEQ ID NO: 193 - protein, 107 aa, Artificial Sequence
  An artificially synthesized sequence
DIQMTQSPSSLSASVGDRVTITCRASQDISSYLNWYQQKPGKAPKLLIYYTSRLHSGVPSRFSGSGSGTDFTFTISSLCPEDIATYYCQQGNTLPYTFGQGTKVEIK

SEQ ID NO: 194 - protein, 107 aa, Artificial Sequence
  An artificially synthesized sequence
DIQMTQSPSSLSASVGDRVTITCRASQDISSYLNWYQQKPGKAPKLLIYYTSRLHSGVPSRFSGSGSGTDFTFTISSLQPEDIATYYCQQGNTLPYTCGQGTKVEIK

SEQ ID NO: 195 - protein, 107 aa, Artificial Sequence
  An artificially synthesized sequence
DIQMTQSPSSLSASVGDRVTITCRASQDISSYLNWYQQKPGKAPKLLIYYTSRLHSGVPSRFSGSGSGTDFTFTISSLQPEDIATYYCQQGNTLPYTFCQGTKVEIK

SEQ ID NO: 196 - protein, 107 aa, Artificial Sequence
  An artificially synthesized sequence
DIQMTQSPSSLSASVGDRVTITCRASQDISSYLNWYQQKPGKAPKLLIYYTSRLHSGVPSRFSGSGSGTDFTFTISSLQPEDIATYYCQQGNTLPYTFGCGTKVEIK

SEQ ID NO: 197 - protein, 107 aa, Artificial Sequence
  An artificially synthesized sequence
DIQMTQSPSSLSASVGDRVTITCRASQDISSYLNWYQQKPGKAPKLLIYYTSRLHSGVPSRFSGSGSGTDFTFTISSLQPEDIATYYCQQGNTLPYTFGQCTKVEIK

SEQ ID NO: 198 - protein, 107 aa, Artificial Sequence
  An artificially synthesized sequence
DIQMTQSPSSLSASVGDRVTITCRASQDISSYLNWYQQKPGKAPKLLIYYTSRLHSGVPSRFSGSGSGTDFTFTISSLQPEDIATYYCQQGNTLPYTFGQGCKVEIK

SEQ ID NO: 199 - protein, 107 aa, Artificial Sequence
  An artificially synthesized sequence
DIQMTQSPSSLSASVGDRVTITCRASQDISSYLNWYQQKPGKAPKLLIYYTSRLHSGVPSRFSGSGSGTDFTFTISSLQPEDIATYYCQQGNTLPYTFGQGTCVEIK

SEQ ID NO: 200 - protein, 107 aa, Artificial Sequence
  An artificially synthesized sequence
DIQMTQSPSSLSASVGDRVTITCRASQDISSYLNWYQQKPGKAPKLLIYYTSRLHSGVPSRFSGSGSGTDFTFTISSLQPEDIATYYCQQGNTLPYTFGQGTKCEIK

SEQ ID NO: 201 - protein, 107 aa, Artificial Sequence
  An artificially synthesized sequence
DIQMTQSPSSLSASVGDRVTITCRASQDISSYLNWYQQKPGKAPKLLIYYTSRLHSGVPSRFSGSGSGTDFTFTISSLQPEDIATYYCQQGNTLPYTFGQGTKVCIK

SEQ ID NO: 202 - protein, 107 aa, Artificial Sequence
  An artificially synthesized sequence
DIQMTQSPSSLSASVGDRVTITCRASQDISSYLNWYQQKPGKAPKLLIYYTSRLHSGVPSRFSGSGSGTDFTFTISSLQPEDIATYYCQQGNTLPYTFGQGTKVECK

SEQ ID NO: 203 - protein, 107 aa, Artificial Sequence
  An artificially synthesized sequence
DIQMTQSPSSLSASVGDRVTITCRASQDISSYLNWYQQKPGKAPKLLIYYTSRLHSGVPSRFSGSGSGTDFTFTISSLQPEDIATYYCQQGNTLPYTFGQGTKVEIC

SEQ ID NO: 204 - protein, 107 aa, Artificial Sequence
  An artificially synthesized sequence
DIQMTQSPSSLSASVGDRVTITCRCSQDISSYLNWYQQKPGKAPKLLIYYTSRLHSGVPSRFSGSGSGTDFTFTISSLQPEDIATYYCQQGNTLPYTFGQGTKVEIK

SEQ ID NO: 205 - protein, 107 aa, Artificial Sequence
  An artificially synthesized sequence
DIQMTQSPSSLSASVGDRVTITCRACQDISSYLNWYQQKPGKAPKLLIYYTSRLHSGVPSRFSGSGSGTDFTFTISSLQPEDIATYYCQQGNTLPYTFGQGTKVEIK

SEQ ID NO: 206 - protein, 107 aa, Artificial Sequence
  An artificially synthesized sequence
DIQMTQSPSSLSASVGDRVTITCRASCDISSYLNWYQQKPGKAPKLLIYYTSRLHSGVPSRFSGSGSGTDFTFTISSLQPEDIATYYCQQGNTLPYTFGQGTKVEIK

SEQ ID NO: 207 - protein, 107 aa, Artificial Sequence
  An artificially synthesized sequence
DIQMTQSPSSLSASVGDRVTITCRASQDISSCLNWYQQKPGKAPKLLIYYTSRLHSGVPSRFSGSGSGTDFTFTISSLQPEDIATYYCQQGNTLPYTFGQGTKVEIK

SEQ ID NO: 208 - protein, 107 aa, Artificial Sequence
  An artificially synthesized sequence
DIQMTQSPSSLSASVGDRVTITCRASQDISSYCNWYQQKPGKAPKLLIYYTSRLHSGVPSRFSGSGSGTDFTFTISSLQPEDIATYYCQQGNTLPYTFGQGTKVEIK

SEQ ID NO: 209 - protein, 107 aa, Artificial Sequence
  An artificially synthesized sequence
DIQMTQSPSSLSASVGDRVTITCRASQDISSYLCWYQQKPGKAPKLLIYYTSRLHSGVPSRFSGSGSGTDFTFTISSLQPEDIATYYCQQGNTLPYTFGQGTKVEIK

SEQ ID NO: 210 - protein, 107 aa, Artificial Sequence
  An artificially synthesized sequence
DIQMTQSPSSLSASVGDRVTITCRASQDISSYLNWYQQKPGKAPKLLIYCTSRLHSGVPSRFSGSGSGTDFTFTISSLQPEDIATYYCQQGNTLPYTFGQGTKVEIK

SEQ ID NO: 211 - protein, 107 aa, Artificial Sequence
  An artificially synthesized sequence
DIQMTQSPSSLSASVGDRVTITCRASQDISSYLNWYQQKPGKAPKLLIYYCSRLHSGVPSRFSGSGSGTDFTFTISSLQPEDIATYYCQQGNTLPYTFGQGTKVEIK

SEQ ID NO: 212 - protein, 107 aa, Artificial Sequence
  An artificially synthesized sequence
DIQMTQSPSSLSASVGDRVTITCRASQDISSYLNWYQQKPGKAPKLLIYYTSRLCSGVPSRFSGSGSGTDFTFTISSLQPEDIATYYCQQGNTLPYTFGQGTKVEIK

SEQ ID NO: 213 - protein, 107 aa, Artificial Sequence
  An artificially synthesized sequence
DIQMTQSPSSLSASVGDRVTITCRASQDISSYLNWYQQKPGKAPKLLIYYTSRLHCGVPSRFSGSGSGTDFTFTISSLQPEDIATYYCQQGNTLPYTFGQGTKVEIK

SEQ ID NO: 214 - protein, 107 aa, Artificial Sequence
  An artificially synthesized sequence
DIQMTQSPSSLSASVGDRVTITCRASQDISSYLNWYQQKPGKAPKLLIYYTSRLHSGVPSRFSGSGSGTDFTFTISSLQPEDIATYYCQQGNTLPCTFGQGTKVEIK

SEQ ID NO: 215 - protein, 107 aa, Artificial Sequence
  An artificially synthesized sequence
DIQMTQSPSSLSASVGDRVTITCRASQDISSYLNWYQQKPGKAPKLLIYYTSRLHSGVPSRFSGSGSGTDFTFTISSLQPEDIATYYCQQGNTLPYCFGQGTKVEIK

SEQ ID NO: 216 - protein, 107 aa, Artificial Sequence
  An artificially synthesized sequence
CTVAAPSVFIFPPSDEQLKSGTASVVCLLNNFYPREAKVQWKVDNALQSGNSQESVTEQDSKDSTYSLSSTLTLSKADYEKHKVYACEVTHQGLSSPVTKSFNRGEC

SEQ ID NO: 217 - protein, 107 aa, Artificial Sequence
  An artificially synthesized sequence
RCVAAPSVFIFPPSDEQLKSGTASVVCLLNNFYPREAKVQWKVDNALQSGNSQESVTEQDSKDSTYSLSSTLTLSKADYEKHKVYACEVTHQGLSSPVTKSFNRGEC

SEQ ID NO: 218 - protein, 107 aa, Artificial Sequence
  An artificially synthesized sequence
RTCAAPSVFIFPPSDEQLKSGTASVVCLLNNFYPREAKVQWKVDNALQSGNSQESVTEQDSKDSTYSLSSTLTLSKADYEKHKVYACEVTHQGLSSPVTKSFNRGEC

SEQ ID NO: 219 - protein, 107 aa, Artificial Sequence
  An artificially synthesized sequence
RTVCAPSVFIFPPSDEQLKSGTASVVCLLNNFYPREAKVQWKVDNALQSGNSQESVTEQDSKDSTYSLSSTLTLSKADYEKHKVYACEVTHQGLSSPVTKSFNRGEC

SEQ ID NO: 220 - protein, 107 aa, Artificial Sequence
  An artificially synthesized sequence
RTVACPSVFIFPPSDEQLKSGTASVVCLLNNFYPREAKVQWKVDNALQSGNSQESVTEQDSKDSTYSLSSTLTLSKADYEKHKVYACEVTHQGLSSPVTKSFNRGEC

SEQ ID NO: 221 - protein, 107 aa, Artificial Sequence
  An artificially synthesized sequence
RTVAACSVFIFPPSDEQLKSGTASVVCLLNNFYPREAKVQWKVDNALQSGNSQESVTEQDSKDSTYSLSSTLTLSKADYEKHKVYACEVTHQGLSSPVTKSFNRGEC

SEQ ID NO: 222 - protein, 107 aa, Artificial Sequence
  An artificially synthesized sequence
RTVAAPCVFIFPPSDEQLKSGTASVVCLLNNFYPREAKVQWKVDNALQSGNSQESVTEQDSKDSTYSLSSTLTLSKADYEKHKVYACEVTHQGLSSPVTKSFNRGEC

SEQ ID NO: 223 - protein, 107 aa, Artificial Sequence
  An artificially synthesized sequence
RTVAAPSCFIFPPSDEQLKSGTASVVCLLNNFYPREAKVQWKVDNALQSGNSQESVTEQDSKDSTYSLSSTLTLSKADYEKHKVYACEVTHQGLSSPVTKSFNRGEC

SEQ ID NO: 224 - protein, 107 aa, Artificial Sequence
  An artificially synthesized sequence
RTVAAPSVCIFPPSDEQLKSGTASVVCLLNNFYPREAKVQWKVDNALQSGNSQESVTEQDSKDSTYSLSSTLTLSKADYEKHKVYACEVTHQGLSSPVTKSFNRGEC

SEQ ID NO: 225 - protein, 107 aa, Artificial Sequence
  An artificially synthesized sequence
RTVAAPSVFIFPCSDEQLKSGTASVVCLLNNFYPREAKVQWKVDNALQSGNSQESVTEQDSKDSTYSLSSTLTLSKADYEKHKVYACEVTHQGLSSPVTKSFNRGEC

SEQ ID NO: 226 - protein, 107 aa, Artificial Sequence
  An artificially synthesized sequence
RTVAAPSVFIFPPCDEQLKSGTASVVCLLNNFYPREAKVQWKVDNALQSGNSQESVTEQDSKDSTYSLSSTLTLSKADYEKHKVYACEVTHQGLSSPVTKSFNRGEC

SEQ ID NO: 227 - protein, 107 aa, Artificial Sequence
  An artificially synthesized sequence
RTVAAPSVFIFPPSCEQLKSGTASVVCLLNNFYPREAKVQWKVDNALQSGNSQESVTEQDSKDSTYSLSSTLTLSKADYEKHKVYACEVTHQGLSSPVTKSFNRGEC

SEQ ID NO: 228 - protein, 107 aa, Artificial Sequence
  An artificially synthesized sequence
RTVAAPSVFIFPPSDCQLKSGTASVVCLLNNFYPREAKVQWKVDNALQSGNSQESVTEQDSKDSTYSLSSTLTLSKADYEKHKVYACEVTHQGLSSPVTKSFNRGEC

SEQ ID NO: 229 - protein, 107 aa, Artificial Sequence
  An artificially synthesized sequence
RTVAAPSVFIFPPSDECLKSGTASVVCLLNNFYPREAKVQWKVDNALQSGNSQESVTEQDSKDSTYSLSSTLTLSKADYEKHKVYACEVTHQGLSSPVTKSFNRGEC

SEQ ID NO: 230 - protein, 107 aa, Artificial Sequence
  An artificially synthesized sequence
RTVAAPSVFIFPPSDEQCKSGTASVVCLLNNFYPREAKVQWKVDNALQSGNSQESVTEQDSKDSTYSLSSTLTLSKADYEKHKVYACEVTHQGLSSPVTKSFNRGEC

SEQ ID NO: 231 - protein, 107 aa, Artificial Sequence
  An artificially synthesized sequence
RTVAAPSVFIFPPSDEQLCSGTASVVCLLNNFYPREAKVQWKVDNALQSGNSQESVTEQDSKDSTYSLSSTLTLSKADYEKHKVYACEVTHQGLSSPVTKSFNRGEC

SEQ ID NO: 232 - protein, 107 aa, Artificial Sequence
  An artificially synthesized sequence
RTVAAPSVFIFPPSDEQLKCGTASVVCLLNNFYPREAKVQWKVDNALQSGNSQESVTEQDSKDSTYSLSSTLTLSKADYEKHKVYACEVTHQGLSSPVTKSFNRGEC

SEQ ID NO: 233 - protein, 107 aa, Artificial Sequence
  An artificially synthesized sequence
RTVAAPSVFIFPPSDEQLKSCTASVVCLLNNFYPREAKVQWKVDNALQSGNSQESVTEQDSKDSTYSLSSTLTLSKADYEKHKVYACEVTHQGLSSPVTKSFNRGEC

SEQ ID NO: 234 - protein, 107 aa, Artificial Sequence
  An artificially synthesized sequence
RTVAAPSVFIFPPSDEQLKSGCASVVCLLNNFYPREAKVQWKVDNALQSGNSQESVTEQDSKDSTYSLSSTLTLSKADYEKHKVYACEVTHQGLSSPVTKSFNRGEC

SEQ ID NO: 235 - protein, 107 aa, Artificial Sequence
  An artificially synthesized sequence
RTVAAPSVFIFPPSDEQLKSGTCSVVCLLNNFYPREAKVQWKVDNALQSGNSQESVTEQDSKDSTYSLSSTLTLSKADYEKHKVYACEVTHQGLSSPVTKSFNRGEC

SEQ ID NO: 236 - protein, 107 aa, Artificial Sequence
  An artificially synthesized sequence
RTVAAPSVFIFPPSDEQLKSGTACVVCLLNNFYPREAKVQWKVDNALQSGNSQESVTEQDSKDSTYSLSSTLTLSKADYEKHKVYACEVTHQGLSSPVTKSFNRGEC

SEQ ID NO: 237 - protein, 107 aa, Artificial Sequence
  An artificially synthesized sequence
RTVAAPSVFIFPPSDEQLKSGTASVVCLCNNFYPREAKVQWKVDNALQSGNSQESVTEQDSKDSTYSLSSTLTLSKADYEKHKVYACEVTHQGLSSPVTKSFNRGEC

SEQ ID NO: 238 - protein, 107 aa, Artificial Sequence
  An artificially synthesized sequence
RTVAAPSVFIFPPSDEQLKSGTASVVCLLCNFYPREAKVQWKVDNALQSGNSQESVTEQDSKDSTYSLSSTLTLSKADYEKHKVYACEVTHQGLSSPVTKSFNRGEC

SEQ ID NO: 239 - protein, 107 aa, Artificial Sequence
  An artificially synthesized sequence
RTVAAPSVFIFPPSDEQLKSGTASVVCLLNCFYPREAKVQWKVDNALQSGNSQESVTEQDSKDSTYSLSSTLTLSKADYEKHKVYACEVTHQGLSSPVTKSFNRGEC

SEQ ID NO: 240 - protein, 107 aa, Artificial Sequence
  An artificially synthesized sequence
RTVAAPSVFIFPPSDEQLKSGTASVVCLLNNCYPREAKVQWKVDNALQSGNSQESVTEQDSKDSTYSLSSTLTLSKADYEKHKVYACEVTHQGLSSPVTKSFNRGEC

SEQ ID NO: 241 - protein, 107 aa, Artificial Sequence
  An artificially synthesized sequence
RTVAAPSVFIFPPSDEQLKSGTASVVCLLNNFCPREAKVQWKVDNALQSGNSQESVTEQDSKDSTYSLSSTLTLSKADYEKHKVYACEVTHQGLSSPVTKSFNRGEC

SEQ ID NO: 242 - protein, 107 aa, Artificial Sequence
  An artificially synthesized sequence
RTVAAPSVFIFPPSDEQLKSGTASVVCLLNNFYCREAKVQWKVDNALQSGNSQESVTEQDSKDSTYSLSSTLTLSKADYEKHKVYACEVTHQGLSSPVTKSFNRGEC

SEQ ID NO: 243 - protein, 107 aa, Artificial Sequence
  An artificially synthesized sequence
RTVAAPSVFIFPPSDEQLKSGTASVVCLLNNFYPCEAKVQWKVDNALQSGNSQESVTEQDSKDSTYSLSSTLTLSKADYEKHKVYACEVTHQGLSSPVTKSFNRGEC

SEQ ID NO: 244 - protein, 107 aa, Artificial Sequence
  An artificially synthesized sequence
RTVAAPSVFIFPPSDEQLKSGTASVVCLLNNFYPRCAKVQWKVDNALQSGNSQESVTEQDSKDSTYSLSSTLTLSKADYEKHKVYACEVTHQGLSSPVTKSFNRGEC

SEQ ID NO: 245 - protein, 107 aa, Artificial Sequence
  An artificially synthesized sequence
RTVAAPSVFIFPPSDEQLKSGTASVVCLLNNFYPRECKVQWKVDNALQSGNSQESVTEQDSKDSTYSLSSTLTLSKADYEKHKVYACEVTHQGLSSPVTKSFNRGEC

SEQ ID NO: 246 - protein, 107 aa, Artificial Sequence
  An artificially synthesized sequence
RTVAAPSVFIFPPSDEQLKSGTASVVCLLNNFYPREACVQWKVDNALQSGNSQESVTEQDSKDSTYSLSSTLTLSKADYEKHKVYACEVTHQGLSSPVTKSFNRGEC

SEQ ID NO: 247 - protein, 107 aa, Artificial Sequence
  An artificially synthesized sequence
RTVAAPSVFIFPPSDEQLKSGTASVVCLLNNFYPREAKCQWKVDNALQSGNSQESVTEQDSKDSTYSLSSTLTLSKADYEKHKVYACEVTHQGLSSPVTKSFNRGEC

SEQ ID NO: 248 - protein, 107 aa, Artificial Sequence
  An artificially synthesized sequence
RTVAAPSVFIFPPSDEQLKSGTASVVCLLNNFYPREAKVCWKVDNALQSGNSQESVTEQDSKDSTYSLSSTLTLSKADYEKHKVYACEVTHQGLSSPVTKSFNRGEC

SEQ ID NO: 249 - protein, 107 aa, Artificial Sequence
  An artificially synthesized sequence
RTVAAPSVFIFPPSDEQLKSGTASVVCLLNNFYPREAKVQCKVDNALQSGNSQESVTEQDSKDSTYSLSSTLTLSKADYEKHKVYACEVTHQGLSSPVTKSFNRGEC

SEQ ID NO: 250 - protein, 107 aa, Artificial Sequence
  An artificially synthesized sequence
RTVAAPSVFIFPPSDEQLKSGTASVVCLLNNFYPREAKVQWCVDNALQSGNSQESVTEQDSKDSTYSLSSTLTLSKADYEKHKVYACEVTHQGLSSPVTKSFNRGEC

SEQ ID NO: 251 - protein, 107 aa, Artificial Sequence
  An artificially synthesized sequence
RTVAAPSVFIFPPSDEQLKSGTASVVCLLNNFYPREAKVQWKCDNALQSGNSQESVTEQDSKDSTYSLSSTLTLSKADYEKHKVYACEVTHQGLSSPVTKSFNRGEC

SEQ ID NO: 252 - protein, 107 aa, Artificial Sequence
  An artificially synthesized sequence
RTVAAPSVFIFPPSDEQLKSGTASVVCLLNNFYPREAKVQWKVCNALQSGNSQESVTEQDSKDSTYSLSSTLTLSKADYEKHKVYACEVTHQGLSSPVTKSFNRGEC

SEQ ID NO: 253 - protein, 107 aa, Artificial Sequence
  An artificially synthesized sequence
RTVAAPSVFIFPPSDEQLKSGTASVVCLLNNFYPREAKVQWKVDCALQSGNSQESVTEQDSKDSTYSLSSTLTLSKADYEKHKVYACEVTHQGLSSPVTKSFNRGEC

SEQ ID NO: 254 - protein, 107 aa, Artificial Sequence
  An artificially synthesized sequence
RTVAAPSVFIFPPSDEQLKSGTASVVCLLNNFYPREAKVQWKVDNCLQSGNSQESVTEQDSKDSTYSLSSTLTLSKADYEKHKVYACEVTHQGLSSPVTKSFNRGEC

SEQ ID NO: 255 - protein, 107 aa, Artificial Sequence
  An artificially synthesized sequence
RTVAAPSVFIFPPSDEQLKSGTASVVCLLNNFYPREAKVQWKVDNACQSGNSQESVTEQDSKDSTYSLSSTLTLSKADYEKHKVYACEVTHQGLSSPVTKSFNRGEC

SEQ ID NO: 256 - protein, 107 aa, Artificial Sequence
  An artificially synthesized sequence
RTVAAPSVFIFPPSDEQLKSGTASVVCLLNNFYPREAKVQWKVDNALCSGNSQESVTEQDSKDSTYSLSSTLTLSKADYEKHKVYACEVTHQGLSSPVTKSFNRGEC

SEQ ID NO: 257 - protein, 107 aa, Artificial Sequence
  An artificially synthesized sequence
RTVAAPSVFIFPPSDEQLKSGTASVVCLLNNFYPREAKVQWKVDNALQCGNSQESVTEQDSKDSTYSLSSTLTLSKADYEKHKVYACEVTHQGLSSPVTKSFNRGEC

SEQ ID NO: 258 - protein, 107 aa, Artificial Sequence
  An artificially synthesized sequence
RTVAAPSVFIFPPSDEQLKSGTASVVCLLNNFYPREAKVQWKVDNALQSCNSQESVTEQDSKDSTYSLSSTLTLSKADYEKHKVYACEVTHQGLSSPVTKSFNRGEC

SEQ ID NO: 259 - protein, 107 aa, Artificial Sequence
  An artificially synthesized sequence
RTVAAPSVFIFPPSDEQLKSGTASVVCLLNNFYPREAKVQWKVDNALQSGCSQESVTEQDSKDSTYSLSSTLTLSKADYEKHKVYACEVTHQGLSSPVTKSFNRGEC

SEQ ID NO: 260 - protein, 107 aa, Artificial Sequence
  An artificially synthesized sequence
RTVAAPSVFIFPPSDEQLKSGTASVVCLLNNFYPREAKVQWKVDNALQSGNCQESVTEQDSKDSTYSLSSTLTLSKADYEKHKVYACEVTHQGLSSPVTKSFNRGEC

SEQ ID NO: 261 - protein, 107 aa, Artificial Sequence
  An artificially synthesized sequence
RTVAAPSVFIFPPSDEQLKSGTASVVCLLNNFYPREAKVQWKVDNALQSGNSCESVTEQDSKDSTYSLSSTLTLSKADYEKHKVYACEVTHQGLSSPVTKSFNRGEC

SEQ ID NO: 262 - protein, 107 aa, Artificial Sequence
  An artificially synthesized sequence
RTVAAPSVFIFPPSDEQLKSGTASVVCLLNNFYPREAKVQWKVDNALQSGNSQCSVTEQDSKDSTYSLSSTLTLSKADYEKHKVYACEVTHQGLSSPVTKSFNRGEC

SEQ ID NO: 263 - protein, 107 aa, Artificial Sequence
  An artificially synthesized sequence
RTVAAPSVFIFPPSDEQLKSGTASVVCLLNNFYPREAKVQWKVDNALQSGNSQECVTEQDSKDSTYSLSSTLTLSKADYEKHKVYACEVTHQGLSSPVTKSFNRGEC

SEQ ID NO: 264 - protein, 107 aa, Artificial Sequence
  An artificially synthesized sequence
RTVAAPSVFIFPPSDEQLKSGTASVVCLLNNFYPREAKVQWKVDNALQSGNSQESCTEQDSKDSTYSLSSTLTLSKADYEKHKVYACEVTHQGLSSPVTKSFNRGEC

SEQ ID NO: 265 - protein, 107 aa, Artificial Sequence
  An artificially synthesized sequence
RTVAAPSVFIFPPSDEQLKSGTASVVCLLNNFYPREAKVQWKVDNALQSGNSQESVCEQDSKDSTYSLSSTLTLSKADYEKHKVYACEVTHQGLSSPVTKSFNRGEC

SEQ ID NO: 266 - protein, 107 aa, Artificial Sequence
  An artificially synthesized sequence
RTVAAPSVFIFPPSDEQLKSGTASVVCLLNNFYPREAKVQWKVDNALQSGNSQESVTCQDSKDSTYSLSSTLTLSKADYEKHKVYACEVTHQGLSSPVTKSFNRGEC

SEQ ID NO: 267 - protein, 107 aa, Artificial Sequence
  An artificially synthesized sequence
RTVAAPSVFIFPPSDEQLKSGTASVVCLLNNFYPREAKVQWKVDNALQSGNSQESVTECDSKDSTYSLSSTLTLSKADYEKHKVYACEVTHQGLSSPVTKSFNRGEC

SEQ ID NO: 268 - protein, 107 aa, Artificial Sequence
  An artificially synthesized sequence
RTVAAPSVFIFPPSDEQLKSGTASVVCLLNNFYPREAKVQWKVDNALQSGNSQESVTEQCSKDSTYSLSSTLTLSKADYEKHKVYACEVTHQGLSSPVTKSFNRGEC

SEQ ID NO: 269 - protein, 107 aa, Artificial Sequence
  An artificially synthesized sequence
RTVAAPSVFIFPPSDEQLKSGTASVVCLLNNFYPREAKVQWKVDNALQSGNSQESVTEQDCKDSTYSLSSTLTLSKADYEKHKVYACEVTHQGLSSPVTKSFNRGEC

SEQ ID NO: 270 - protein, 107 aa, Artificial Sequence
  An artificially synthesized sequence
RTVAAPSVFIFPPSDEQLKSGTASVVCLLNNFYPREAKVQWKVDNALQSGNSQESVTEQDSCDSTYSLSSTLTLSKADYEKHKVYACEVTHQGLSSPVTKSFNRGEC

SEQ ID NO: 271 - protein, 107 aa, Artificial Sequence
  An artificially synthesized sequence
RTVAAPSVFIFPPSDEQLKSGTASVVCLLNNFYPREAKVQWKVDNALQSGNSQESVTEQDSKCSTYSLSSTLTLSKADYEKHKVYACEVTHQGLSSPVTKSFNRGEC

SEQ ID NO: 272 - protein, 107 aa, Artificial Sequence
  An artificially synthesized sequence
RTVAAPSVFIFPPSDEQLKSGTASVVCLLNNFYPREAKVQWKVDNALQSGNSQESVTEQDSKDCTYSLSSTLTLSKADYEKHKVYACEVTHQGLSSPVTKSFNRGEC

SEQ ID NO: 273 - protein, 107 aa, Artificial Sequence
  An artificially synthesized sequence
RTVAAPSVFIFPPSDEQLKSGTASVVCLLNNFYPREAKVQWKVDNALQSGNSQESVTEQDSKDSCYSLSSTLTLSKADYEKHKVYACEVTHQGLSSPVTKSFNRGEC

SEQ ID NO: 274 - protein, 107 aa, Artificial Sequence
  An artificially synthesized sequence
RTVAAPSVFIFPPSDEQLKSGTASVVCLLNNFYPREAKVQWKVDNALQSGNSQESVTEQDSKDSTCSLSSTLTLSKADYEKHKVYACEVTHQGLSSPVTKSFNRGEC

SEQ ID NO: 275 - protein, 107 aa, Artificial Sequence
  An artificially synthesized sequence
RTVAAPSVFIFPPSDEQLKSGTASVVCLLNNFYPREAKVQWKVDNALQSGNSQESVTEQDSKDSTYCLSSTLTLSKADYEKHKVYACEVTHQGLSSPVTKSFNRGEC

SEQ ID NO: 276 - protein, 107 aa, Artificial Sequence
  An artificially synthesized sequence
RTVAAPSVFIFPPSDEQLKSGTASVVCLLNNFYPREAKVQWKVDNALQSGNSQESVTEQDSKDSTYSCSSTLTLSKADYEKHKVYACEVTHQGLSSPVTKSFNRGEC

SEQ ID NO: 277 - protein, 107 aa, Artificial Sequence
  An artificially synthesized sequence
RTVAAPSVFIFPPSDEQLKSGTASVVCLLNNFYPREAKVQWKVDNALQSGNSQESVTEQDSKDSTYSLSSTLCLSKADYEKHKVYACEVTHQGLSSPVTKSFNRGEC

SEQ ID NO: 278 - protein, 107 aa, Artificial Sequence
  An artificially synthesized sequence
RTVAAPSVFIFPPSDEQLKSGTASVVCLLNNFYPREAKVQWKVDNALQSGNSQESVTEQDSKDSTYSLSSTLTCSKADYEKHKVYACEVTHQGLSSPVTKSFNRGEC

SEQ ID NO: 279 - protein, 107 aa, Artificial Sequence
  An artificially synthesized sequence
RTVAAPSVFIFPPSDEQLKSGTASVVCLLNNFYPREAKVQWKVDNALQSGNSQESVTEQDSKDSTYSLSSTLTLCKADYEKHKVYACEVTHQGLSSPVTKSFNRGEC

SEQ ID NO: 280 - protein, 107 aa, Artificial Sequence
  An artificially synthesized sequence
RTVAAPSVFIFPPSDEQLKSGTASVVCLLNNFYPREAKVQWKVDNALQSGNSQESVTEQDSKDSTYSLSSTLTLSCADYEKHKVYACEVTHQGLSSPVTKSFNRGEC

SEQ ID NO: 281 - protein, 107 aa, Artificial Sequence
  An artificially synthesized sequence
RTVAAPSVFIFPPSDEQLKSGTASVVCLLNNFYPREAKVQWKVDNALQSGNSQESVTEQDSKDSTYSLSSTLTLSKCDYEKHKVYACEVTHQGLSSPVTKSFNRGEC

SEQ ID NO: 282 - protein, 107 aa, Artificial Sequence
  An artificially synthesized sequence
RTVAAPSVFIFPPSDEQLKSGTASVVCLLNNFYPREAKVQWKVDNALQSGNSQESVTEQDSKDSTYSLSSTLTLSKACYEKHKVYACEVTHQGLSSPVTKSFNRGEC

SEQ ID NO: 283 - protein, 107 aa, Artificial Sequence
  An artificially synthesized sequence
RTVAAPSVFIFPPSDEQLKSGTASVVCLLNNFYPREAKVQWKVDNALQSGNSQESVTEQDSKDSTYSLSSTLTLSKADCEKHKVYACEVTHQGLSSPVTKSFNRGEC

SEQ ID NO: 284 - protein, 107 aa, Artificial Sequence
  An artificially synthesized sequence
RTVAAPSVFIFPPSDEQLKSGTASVVCLLNNFYPREAKVQWKVDNALQSGNSQESVTEQDSKDSTYSLSSTLTLSKADYCKHKVYACEVTHQGLSSPVTKSFNRGEC

SEQ ID NO: 285 - protein, 107 aa, Artificial Sequence
  An artificially synthesized sequence
RTVAAPSVFIFPPSDEQLKSGTASVVCLLNNFYPREAKVQWKVDNALQSGNSQESVTEQDSKDSTYSLSSTLTLSKADYECHKVYACEVTHQGLSSPVTKSFNRGEC

SEQ ID NO: 286 - protein, 107 aa, Artificial Sequence
  An artificially synthesized sequence
RTVAAPSVFIFPPSDEQLKSGTASVVCLLNNFYPREAKVQWKVDNALQSGNSQESVTEQDSKDSTYSLSSTLTLSKADYEKCKVYACEVTHQGLSSPVTKSFNRGEC

SEQ ID NO: 287 - protein, 107 aa, Artificial Sequence
  An artificially synthesized sequence
RTVAAPSVFIFPPSDEQLKSGTASVVCLLNNFYPREAKVQWKVDNALQSGNSQESVTEQDSKDSTYSLSSTLTLSKADYEKHCVYACEVTHQGLSSPVTKSFNRGEC

SEQ ID NO: 288 - protein, 107 aa, Artificial Sequence
  An artificially synthesized sequence
RTVAAPSVFIFPPSDEQLKSGTASVVCLLNNFYPREAKVQWKVDNALQSGNSQESVTEQDSKDSTYSLSSTLTLSKADYEKHKCYACEVTHQGLSSPVTKSFNRGEC

SEQ ID NO: 289 - protein, 107 aa, Artificial Sequence
  An artificially synthesized sequence
RTVAAPSVFIFPPSDEQLKSGTASVVCLLNNFYPREAKVQWKVDNALQSGNSQESVTEQDSKDSTYSLSSTLTLSKADYEKHKVCACEVTHQGLSSPVTKSFNRGEC

SEQ ID NO: 290 - protein, 107 aa, Artificial Sequence
  An artificially synthesized sequence
RTVAAPSVFIFPPSDEQLKSGTASVVCLLNNFYPREAKVQWKVDNALQSGNSQESVTEQDSKDSTYSLSSTLTLSKADYEKHKVYCCEVTHQGLSSPVTKSFNRGEC

SEQ ID NO: 291 - protein, 107 aa, Artificial Sequence
  An artificially synthesized sequence
RTVAAPSVFIFPPSDEQLKSGTASVVCLLNNFYPREAKVQWKVDNALQSGNSQESVTEQDSKDSTYSLSSTLTLSKADYEKHKVYACCVTHQGLSSPVTKSFNRGEC

SEQ ID NO: 292 - protein, 107 aa, Artificial Sequence
  An artificially synthesized sequence
RTVAAPSVFIFPPSDEQLKSGTASVVCLLNNFYPREAKVQWKVDNALQSGNSQESVTEQDSKDSTYSLSSTLTLSKADYEKHKVYACECTHQGLSSPVTKSFNRGEC

SEQ ID NO: 293 - protein, 107 aa, Artificial Sequence
  An artificially synthesized sequence
RTVAAPSVFIFPPSDEQLKSGTASVVCLLNNFYPREAKVQWKVDNALQSGNSQESVTEQDSKDSTYSLSSTLTLSKADYEKHKVYACEVCHQGLSSPVTKSFNRGEC

SEQ ID NO: 294 - protein, 107 aa, Artificial Sequence
  An artificially synthesized sequence
RTVAAPSVFIFPPSDEQLKSGTASVVCLLNNFYPREAKVQWKVDNALQSGNSQESVTEQDSKDSTYSLSSTLTLSKADYEKHKVYACEVTCQGLSSPVTKSFNRGEC

SEQ ID NO: 295 - protein, 107 aa, Artificial Sequence
  An artificially synthesized sequence
RTVAAPSVFIFPPSDEQLKSGTASVVCLLNNFYPREAKVQWKVDNALQSGNSQESVTEQDSKDSTYSLSSTLTLSKADYEKHKVYACEVTHCGLSSPVTKSFNRGEC

SEQ ID NO: 296 - protein, 107 aa, Artificial Sequence
  An artificially synthesized sequence
RTVAAPSVFIFPPSDEQLKSGTASVVCLLNNFYPREAKVQWKVDNALQSGNSQESVTEQDSKDSTYSLSSTLTLSKADYEKHKVYACEVTHQCLSSPVTKSFNRGEC

SEQ ID NO: 297 - protein, 107 aa, Artificial Sequence
  An artificially synthesized sequence
RTVAAPSVFIFPPSDEQLKSGTASVVCLLNNFYPREAKVQWKVDNALQSGNSQESVTEQDSKDSTYSLSSTLTLSKADYEKHKVYACEVTHQGCSSPVTKSFNRGEC

SEQ ID NO: 298 - protein, 107 aa, Artificial Sequence
  An artificially synthesized sequence
RTVAAPSVFIFPPSDEQLKSGTASVVCLLNNFYPREAKVQWKVDNALQSGNSQESVTEQDSKDSTYSLSSTLTLSKADYEKHKVYACEVTHQGLCSPVTKSFNRGEC

SEQ ID NO: 299 - protein, 107 aa, Artificial Sequence
  An artificially synthesized sequence
RTVAAPSVFIFPPSDEQLKSGTASVVCLLNNFYPREAKVQWKVDNALQSGNSQESVTEQDSKDSTYSLSSTLTLSKADYEKHKVYACEVTHQGLSCPVTKSFNRGEC

SEQ ID NO: 300 - protein, 107 aa, Artificial Sequence
  An artificially synthesized sequence
RTVAAPSVFIFPPSDEQLKSGTASVVCLLNNFYPREAKVQWKVDNALQSGNSQESVTEQDSKDSTYSLSSTLTLSKADYEKHKVYACEVTHQGLSSCVTKSFNRGEC

SEQ ID NO: 301 - protein, 107 aa, Artificial Sequence
  An artificially synthesized sequence
RTVAAPSVFIFPPSDEQLKSGTASVVCLLNNFYPREAKVQWKVDNALQSGNSQESVTEQDSKDSTYSLSSTLTLSKADYEKHKVYACEVTHQGLSSPCTKSFNRGEC

SEQ ID NO: 302 - protein, 107 aa, Artificial Sequence
  An artificially synthesized sequence
RTVAAPSVFIFPPSDEQLKSGTASVVCLLNNFYPREAKVQWKVDNALQSGNSQESVTEQDSKDSTYSLSSTLTLSKADYEKHKVYACEVTHQGLSSPVCKSFNRGEC

SEQ ID NO: 303 - protein, 107 aa, Artificial Sequence
  An artificially synthesized sequence
RTVAAPSVFIFPPSDEQLKSGTASVVCLLNNFYPREAKVQWKVDNALQSGNSQESVTEQDSKDSTYSLSSTLTLSKADYEKHKVYACEVTHQGLSSPVTCSFNRGEC

SEQ ID NO: 304 - protein, 107 aa, Artificial Sequence
  An artificially synthesized sequence
RTVAAPSVFIFPPSDEQLKSGTASVVCLLNNFYPREAKVQWKVDNALQSGNSQESVTEQDSKDSTYSLSSTLTLSKADYEKHKVYACEVTHQGLSSPVTKCFNRGEC

SEQ ID NO: 305 - protein, 107 aa, Artificial Sequence
  An artificially synthesized sequence
RTVAAPSVFIFPPSDEQLKSGTASVVCLLNNFYPREAKVQWKVDNALQSGNSQESVTEQDSKDSTYSLSSTLTLSKADYEKHKVYACEVTHQGLSSPVTKSCNRGEC

SEQ ID NO: 306 - protein, 107 aa, Artificial Sequence
  An artificially synthesized sequence
RTVAAPSVFIFPPSDEQLKSGTASVVCLLNNFYPREAKVQWKVDNALQSGNSQESVTEQDSKDSTYSLSSTLTLSKADYEKHKVYACEVTHQGLSSPVTKSFCRGEC

SEQ ID NO: 307 - protein, 107 aa, Artificial Sequence
  An artificially synthesized sequence
RTVAAPSVFIFPPSDEQLKSGTASVVCLLNNFYPREAKVQWKVDNALQSGNSQESVTEQDSKDSTYSLSSTLTLSKADYEKHKVYACEVTHQGLSSPVTKSFNCGEC

SEQ ID NO: 308 - protein, 107 aa, Artificial Sequence
  An artificially synthesized sequence
RTVAAPSVFIFPPSDEQLKSGTASVVCLLNNFYPREAKVQWKVDNALQSGNSQESVTEQDSKDSTYSLSSTLTLSKADYEKHKVYACEVTHQGLSSPVTKSFNRCEC

SEQ ID NO: 309 - protein, 107 aa, Artificial Sequence
  An artificially synthesized sequence
RTVAAPSVFIFPPSDEQLKSGTASVVCLLNNFYPREAKVQWKVDNALQSGNSQESVTEQDSKDSTYSLSSTLTLSKADYEKHKVYACEVTHQGLSSPVTKSFNRGCC

SEQ ID NO: 310 - protein, 444 aa, Artificial Sequence
  An artificially synthesized sequence
QVQLQESGPGLVRPSQTLSLTCTVSGYSITSDHAWSWVRQPPGRGLEWIGYISYSGITTYNPSLKSRVTMLRDTSKNQFSLRLSSVTAADTAVYYCARSLARTTAMDYWGQGSLVTVSSASTKGPSVFPLAPCSRSTSESTAALGCLVKDYFPEPVTVSWNSGALTSGVHTFPAVLQSSGLYSLSSVVTVPSSSLGTQTYTCNVDHKPSNTKVDKRVESKYGPPCPPCPAPEFRRGPSVFLFPPKPKDTLMISRTPEVTCVVVDVSQEDPEVQFNWYVDGVEVHNAKTKPREEQYNSTYRVVSVLTVLHQDWLNGKEYKCKVSNKGLPSSIEKTISKAKGQPREPQVYTLPPSQEEMTKNQVSLTCLVKGFYPSDIAVEWESNGQPENNYKTTPPVLDSDGSFFLYSRLTVDKSRWQEGNVFSCSVMHEALHNHYTQKSLSLSP

SEQ ID NO: 311 - protein, 325 aa, Artificial Sequence
  An artificially synthesized sequence
ASTKGPSVFPLAPCSRSTSESTAALGCLVKDYFPEPVTVSWNSGALTSGVHTFPAVLQSSGLYSLSSVVTVPSSSLGTQTYTCNVDHKPSNTKVDKRVESKYGPPCPPCPAPEFRRGPSVFLFPPKPKDTLMISRTPEVTCVVVDVSQEDPEVQFNWYVDGVEVHNAKTKPREEQYNSTYRVVSVLTVLHQDWLNGKEYKCKVSNKGLPSSIEKTISKAKGQPREPQVYTLPPSQEEMTKNQVSLTCLVKGFYPSDIAVEWESNGQPENNYKTTPPVLDSDGSFFLYSRLTVDKSRWQEGNVFSCSVMHEALHNHYTQKSLSLSP

SEQ ID NO: 312 - protein, 443 aa, Artificial Sequence
  An artificially synthesized sequence
QVQLQESGPGLVRPSQTLSLTCTVSGYSITSDHAWSWVRQPPGRGLEWIGYISYSGITTYNPSLKSRVTMLRDTSKNQFSLRLSSVTAADTAVYYCARSLARTTAMDYWGQGSLVTVSSASTKGPSVFPLAPCSRSTSESTAALGCLVKDYFPEPVTVSWNSGALTSGVHTFPAVLQSSGLYSLSSVVTVPSSNFGTQTYTCNVDHKPSNTKVDKTVERKCCVECPPCPAPPVAGPSVFLFPPKPKDTLMISRTPEVTCVVVDVSHEDPEVQFNWYVDGVEVHNAKTKPREEQFNSTFRVVSVLTVVHQDWLNGKEYKCKVSNKGLPAPIEKTISKTKGQPREPQVYTLPPSREEMTKNQVSLTCLVKGFYPSDIAVEWESNGQPENNYKTTPPMLDSDGSFFLYSKLTVDKSRWQQGNVFSCSVMHEALHNHYTQKSLSLSP

SEQ ID NO: 313 - protein, 324 aa, Artificial Sequence
  An artificially synthesized sequence
ASTKGPSVFPLAPCSRSTSESTAALGCLVKDYFPEPVTVSWNSGALTSGVHTFPAVLQSSGLYSLSSVVTVPSSNFGTQTYTCNVDHKPSNTKVDKTVERKCCVECPPCPAPPVAGPSVFLFPPKPKDTLMISRTPEVTCVVVDVSHEDPEVQFNWYVDGVEVHNAKTKPREEQFNSTFRVVSVLTVVHQDWLNGKEYKCKVSNKGLPAPIEKTISKTKGQPREPQVYTLPPSREEMTKNQVSLTCLVKGFYPSDIAVEWESNGQPENNYKTTPPMLDSDGSFFLYSKLTVDKSRWQQGNVFSCSVMHEALHNHYTQKSLSLSP

SEQ ID NO: 314 - protein, 462 aa, Artificial Sequence
  An artificially synthesized sequence
QVQLVQSGAEVKKPGSSVTVSCKASGGTFSSFSITWLRQAPGQGLEWMGEITPMFGIANYAQKFQGRVTISADESTSTAYMELSGLTSEDTAMYYCARDGRFDVSDLLTDKPKVTINYNGMDVWGQGTLVTVSSASTKGPSVFPLAPSSKSTSGGTAALGCLVKDYFPEPVTVSWNSGALTSGVHTFPAVLQSSGLYSLSSVVTVPSSSLGTQTYICNVNHKPSNTKVDKRVEPKSCDKTHTCPPCPAPELRRGPSVFLFPPKPKDTLMISRTPEVTCVVVDVSHEDPEVKFNWYVDGVEVHNAKTKPREEQYNSTYRVVSVLTVLHQDWLNGKEYKCKVSNKGLPSSIEKTISKAKGQPREPQVYTLPPSREEMTKNQVSLTCLVKGFYPSDIAVEWESNGQPENNYKTTPPVLDSDGSFFLYSKLTVDKSRWQEGNVFSCSVMHEALHNHYTQKSLSLSP

SEQ ID NO: 315 - protein, 134 aa, Artificial Sequence
  An artificially synthesized sequence
QVQLVQSGAEVKKPGSSVTVSCKASGGTFSSFSITWLRQAPGQGLEWMGEITPMFGIANYAQKFQGRVTISADESTSTAYMELSGLTSEDTAMYYCARDGRFDVSDLLTDKPKVTINYNGMDVWGQGTLVTVSS

SEQ ID NO: 316 - protein, 216 aa, Artificial Sequence
  An artificially synthesized sequence
QSVLTQPPSASGTPGQRVTISCSGSSSNIGSNTVNWYQRLPGAAPQLLIYNNDQRPSGIPDRFSGSKSGTSGSLVISGLQSEDEADYYCASWDDSLNGRVFGGGTKLTVLGQPKAAPSVTLFPPSSEELQANKATLVCLISDFYPGAVTVAWKADSSPVKAGVETTTPSKQSNNKYAASSYLSLTPEQWKSHRSYSCQVTHEGSTVEKTVAPTECS

SEQ ID NO: 317 - protein, 110 aa, Artificial Sequence
  An artificially synthesized sequence
QSVLTQPPSASGTPGQRVTISCSGSSSNIGSNTVNWYQRLPGAAPQLLIYNNDQRPSGIPDRFSGSKSGTSGSLVISGLQSEDEADYYCASWDDSLNGRVFGGGTKLTVL

SEQ ID NO: 318 - protein, 106 aa, Artificial Sequence
  An artificially synthesized sequence
GQPKAAPSVTLFPPSSEELQANKATLVCLISDFYPGAVTVAWKADSSPVKAGVETTTPSKQSNNKYAASSYLSLTPEQWKSHRSYSCQVTHEGSTVEKTVAPTECS

SEQ ID NO: 319 - protein, 127 aa, Artificial Sequence
  An artificially synthesized sequence
EVQLVESGGGLVQPGGSLRLSCAASGFTFDDYGMSWVRQAPGKALEWVSAISWNGNNTYYTESMKGRFTISRDNAKNTLYLQMNSLRPEDTAVYYCVKGSTAIVGVPPTYPDEYDYWGQGTLVTVSS

SEQ ID NO: 320 - protein, 230 aa, Artificial Sequence
  An artificially synthesized sequence
EPKSSDKTHTCPPCPAPELLGGPSVFLFPPKPKDTLMISRTPEVTCVVVDVSHEDPEVKFNWYVDGVEVHNAKTKPREEQYNSTYRVVSVLTVLHQDWLNGKEYKCKVSNKALPAPIEKTISKAKGQPREPQVYTLPPSREEMTKNQVSLTCLVKGFYPSDIAVEWESNGQPENNYKTTPPVLDSDGSFFLYSKLTVDKSRWQEGNVFSCSVMHEALHNHYTQKSLSLSP

SEQ ID NO: 321 - protein, 357 aa, Artificial Sequence
  An artificially synthesized sequence
EVQLVESGGGLVQPGGSLRLSCAASGFTFDDYGMSWVRQAPGKALEWVSAISWNGNNTYYTESMKGRFTISRDNAKNTLYLQMNSLRPEDTAVYYCVKGSTAIVGVPPTYPDEYDYWGQGTLVTVSSEPKSSDKTHTCPPCPAPELLGGPSVFLFPPKPKDTLMISRTPEVTCVVVDVSHEDPEVKFNWYVDGVEVHNAKTKPREEQYNSTYRVVSVLTVLHQDWLNGKEYKCKVSNKALPAPIEKTISKAKGQPREPQVYTLPPSREEMTKNQVSLTCLVKGFYPSDIAVEWESNGQPENNYKTTPPVLDSDGSFFLYSKLTVDKSRWQEGNVFSCSVMHEALHNHYTQKSLSLSP

SEQ ID NO: 322 - protein, 119 aa, Artificial Sequence; identical to SEQ ID NO: 21
  An artificially synthesized sequence

SEQ ID NO: 323 - protein, 119 aa, Artificial Sequence; identical to SEQ ID NO: 22
  An artificially synthesized sequence

SEQ ID NO: 324 - protein, 119 aa, Artificial Sequence; identical to SEQ ID NO: 23
  An artificially synthesized sequence

SEQ ID NO: 325 - protein, 119 aa, Artificial Sequence; identical to SEQ ID NO: 24
  An artificially synthesized sequence

SEQ ID NO: 326 - protein, 119 aa, Artificial Sequence; identical to SEQ ID NO: 25
  An artificially synthesized sequence

SEQ ID NO: 327 - protein, 119 aa, Artificial Sequence; identical to SEQ ID NO: 26
  An artificially synthesized sequence

SEQ ID NO: 328 - protein, 119 aa, Artificial Sequence; identical to SEQ ID NO: 27
  An artificially synthesized sequence

SEQ ID NO: 329 - protein, 119 aa, Artificial Sequence; identical to SEQ ID NO: 28
  An artificially synthesized sequence

SEQ ID NO: 330 - protein, 119 aa, Artificial Sequence; identical to SEQ ID NO: 29
  An artificially synthesized sequence

SEQ ID NO: 331 - protein, 119 aa, Artificial Sequence; identical to SEQ ID NO: 30
  An artificially synthesized sequence

SEQ ID NO: 332 - protein, 119 aa, Artificial Sequence; identical to SEQ ID NO: 31
  An artificially synthesized sequence

SEQ ID NO: 333 - protein, 119 aa, Artificial Sequence; identical to SEQ ID NO: 32
  An artificially synthesized sequence

SEQ ID NO: 334 - protein, 119 aa, Artificial Sequence; identical to SEQ ID NO: 33
  An artificially synthesized sequence

SEQ ID NO: 335 - protein, 119 aa, Artificial Sequence; identical to SEQ ID NO: 34
  An artificially synthesized sequence

SEQ ID NO: 336 - protein, 119 aa, Artificial Sequence; identical to SEQ ID NO: 35
  An artificially synthesized sequence

SEQ ID NO: 337 - protein, 119 aa, Artificial Sequence; identical to SEQ ID NO: 36
  An artificially synthesized sequence

SEQ ID NO: 338 - protein, 119 aa, Artificial Sequence; identical to SEQ ID NO: 37
  An artificially synthesized sequence

SEQ ID NO: 339 - protein, 119 aa, Artificial Sequence; identical to SEQ ID NO: 38
  An artificially synthesized sequence

SEQ ID NO: 340 - protein, 119 aa, Artificial Sequence; identical to SEQ ID NO: 39
  An artificially synthesized sequence

SEQ ID NO: 341 - protein, 119 aa, Artificial Sequence; identical to SEQ ID NO: 40
  An artificially synthesized sequence

SEQ ID NO: 342 - protein, 119 aa, Artificial Sequence; identical to SEQ ID NO: 41
  An artificially synthesized sequence

SEQ ID NO: 343 - protein, 119 aa, Artificial Sequence; identical to SEQ ID NO: 42
  An artificially synthesized sequence

SEQ ID NO: 344 - protein, 119 aa, Artificial Sequence; identical to SEQ ID NO: 62
  An artificially synthesized sequence

SEQ ID NO: 345 - protein, 119 aa, Artificial Sequence; identical to SEQ ID NO: 63
  An artificially synthesized sequence

SEQ ID NO: 346 - protein, 119 aa, Artificial Sequence; identical to SEQ ID NO: 64
  An artificially synthesized sequence

SEQ ID NO: 347 - protein, 119 aa, Artificial Sequence; identical to SEQ ID NO: 65
  An artificially synthesized sequence

SEQ ID NO: 348 - protein, 119 aa, Artificial Sequence; identical to SEQ ID NO: 66
  An artificially synthesized sequence

SEQ ID NO: 349 - protein, 119 aa, Artificial Sequence; identical to SEQ ID NO: 67
  An artificially synthesized sequence

SEQ ID NO: 350 - protein, 119 aa, Artificial Sequence; identical to SEQ ID NO: 68
  An artificially synthesized sequence

SEQ ID NO: 351 - protein, 119 aa, Artificial Sequence; identical to SEQ ID NO: 69
  An artificially synthesized sequence

SEQ ID NO: 352 - protein, 119 aa, Artificial Sequence; identical to SEQ ID NO: 70
  An artificially synthesized sequence

SEQ ID NO: 353 - protein, 119 aa, Artificial Sequence; identical to SEQ ID NO: 71
  An artificially synthesized sequence

SEQ ID NO: 354 - protein, 119 aa, Artificial Sequence; identical to SEQ ID NO: 43
  An artificially synthesized sequence

SEQ ID NO: 355 - protein, 119 aa, Artificial Sequence; identical to SEQ ID NO: 44
  An artificially synthesized sequence

SEQ ID NO: 356 - protein, 119 aa, Artificial Sequence; identical to SEQ ID NO: 45
  An artificially synthesized sequence

SEQ ID NO: 357 - protein, 119 aa, Artificial Sequence; identical to SEQ ID NO: 46
  An artificially synthesized sequence

SEQ ID NO: 358 - protein, 119 aa, Artificial Sequence; identical to SEQ ID NO: 47
  An artificially synthesized sequence

SEQ ID NO: 359 - protein, 119 aa, Artificial Sequence; identical to SEQ ID NO: 48
  An artificially synthesized sequence

SEQ ID NO: 360 - protein, 119 aa, Artificial Sequence; identical to SEQ ID NO: 49
  An artificially synthesized sequence

SEQ ID NO: 361 - protein, 119 aa, Artificial Sequence; identical to SEQ ID NO: 50
  An artificially synthesized sequence

SEQ ID NO: 362 - protein, 119 aa, Artificial Sequence; identical to SEQ ID NO: 51
  An artificially synthesized sequence

SEQ ID NO: 363 - protein, 119 aa, Artificial Sequence; identical to SEQ ID NO: 52
  An artificially synthesized sequence

SEQ ID NO: 364 - protein, 119 aa, Artificial Sequence; identical to SEQ ID NO: 53
  An artificially synthesized sequence

SEQ ID NO: 365 - protein, 119 aa, Artificial Sequence; identical to SEQ ID NO: 54
  An artificially synthesized sequence

SEQ ID NO: 366 - protein, 119 aa, Artificial Sequence; identical to SEQ ID NO: 55
  An artificially synthesized sequence

SEQ ID NO: 367 - protein, 119 aa, Artificial Sequence; identical to SEQ ID NO: 56
  An artificially synthesized sequence

SEQ ID NO: 368 - protein, 119 aa, Artificial Sequence; identical to SEQ ID NO: 57
  An artificially synthesized sequence

SEQ ID NO: 369 - protein, 119 aa, Artificial Sequence; identical to SEQ ID NO: 58
  An artificially synthesized sequence

SEQ ID NO: 370 - protein, 119 aa, Artificial Sequence; identical to SEQ ID NO: 59
  An artificially synthesized sequence

SEQ ID NO: 371 - protein, 119 aa, Artificial Sequence; identical to SEQ ID NO: 72
  An artificially synthesized sequence

SEQ ID NO: 372 - protein, 119 aa, Artificial Sequence; identical to SEQ ID NO: 73
  An artificially synthesized sequence

SEQ ID NO: 373 - protein, 119 aa, Artificial Sequence; identical to SEQ ID NO: 60
  An artificially synthesized sequence

SEQ ID NO: 374 - protein, 119 aa, Artificial Sequence; identical to SEQ ID NO: 61
  An artificially synthesized sequence

SEQ ID NO: 375 - protein, 328 aa, Artificial Sequence; identical to SEQ ID NO: 74
  An artificially synthesized sequence

SEQ ID NO: 376 - protein, 328 aa, Artificial Sequence; identical to SEQ ID NO: 75
  An artificially synthesized sequence

SEQ ID NO: 377 - protein, 328 aa, Artificial Sequence; identical to SEQ ID NO: 76
  An artificially synthesized sequence

SEQ ID NO: 378 - protein, 328 aa, Artificial Sequence; identical to SEQ ID NO: 77
  An artificially synthesized sequence

SEQ ID NO: 379 - protein, 328 aa, Artificial Sequence; identical to SEQ ID NO: 78
  An artificially synthesized sequence

SEQ ID NO: 380 - protein, 328 aa, Artificial Sequence; identical to SEQ ID NO: 79
  An artificially synthesized sequence

SEQ ID NO: 381 - protein, 328 aa, Artificial Sequence; identical to SEQ ID NO: 80
  An artificially synthesized sequence

SEQ ID NO: 382 - protein, 328 aa, Artificial Sequence; identical to SEQ ID NO: 81
  An artificially synthesized sequence

SEQ ID NO: 383 - protein, 328 aa, Artificial Sequence; identical to SEQ ID NO: 82
  An artificially synthesized sequence

SEQ ID NO: 384 - protein, 328 aa, Artificial Sequence; identical to SEQ ID NO: 83
  An artificially synthesized sequence

SEQ ID NO: 385 - protein, 328 aa, Artificial Sequence; identical to SEQ ID NO: 84
  An artificially synthesized sequence

SEQ ID NO: 386 - protein, 328 aa, Artificial Sequence; identical to SEQ ID NO: 85
  An artificially synthesized sequence

SEQ ID NO: 387 - protein, 328 aa, Artificial Sequence; identical to SEQ ID NO: 86
  An artificially synthesized sequence

SEQ ID NO: 388 - protein, 328 aa, Artificial Sequence; identical to SEQ ID NO: 87
  An artificially synthesized sequence

SEQ ID NO: 389 - protein, 328 aa, Artificial Sequence; identical to SEQ ID NO: 88
  An artificially synthesized sequence

SEQ ID NO: 390 - protein, 328 aa, Artificial Sequence; identical to SEQ ID NO: 89
  An artificially synthesized sequence

SEQ ID NO: 391 - protein, 328 aa, Artificial Sequence; identical to SEQ ID NO: 90
  An artificially synthesized sequence

SEQ ID NO: 392 - protein, 328 aa, Artificial Sequence; identical to SEQ ID NO: 91
  An artificially synthesized sequence

SEQ ID NO: 393 - protein, 328 aa, Artificial Sequence; identical to SEQ ID NO: 92
  An artificially synthesized sequence

SEQ ID NO: 394 - protein, 328 aa, Artificial Sequence; identical to SEQ ID NO: 93
  An artificially synthesized sequence

SEQ ID NO: 395 - protein, 328 aa, Artificial Sequence; identical to SEQ ID NO: 94
  An artificially synthesized sequence

SEQ ID NO: 396 - protein, 328 aa, Artificial Sequence; identical to SEQ ID NO: 95
  An artificially synthesized sequence

SEQ ID NO: 397 - protein, 328 aa, Artificial Sequence; identical to SEQ ID NO: 96
  An artificially synthesized sequence

SEQ ID NO: 398 - protein, 328 aa, Artificial Sequence; identical to SEQ ID NO: 97
  An artificially synthesized sequence

SEQ ID NO: 399 - protein, 328 aa, Artificial Sequence; identical to SEQ ID NO: 98
  An artificially synthesized sequence

SEQ ID NO: 400 - protein, 328 aa, Artificial Sequence; identical to SEQ ID NO: 99
  An artificially synthesized sequence

SEQ ID NO: 401 - protein, 328 aa, Artificial Sequence; identical to SEQ ID NO: 100
  An artificially synthesized sequence

SEQ ID NO: 402 - protein, 328 aa, Artificial Sequence; identical to SEQ ID NO: 101
  An artificially synthesized sequence

SEQ ID NO: 403 - protein, 328 aa, Artificial Sequence; identical to SEQ ID NO: 102
  An artificially synthesized sequence

SEQ ID NO: 404 - protein, 328 aa, Artificial Sequence; identical to SEQ ID NO: 103
  An artificially synthesized sequence

SEQ ID NO: 405 - protein, 328 aa, Artificial Sequence; identical to SEQ ID NO: 104
  An artificially synthesized sequence

SEQ ID NO: 406 - protein, 328 aa, Artificial Sequence; identical to SEQ ID NO: 105
  An artificially synthesized sequence

SEQ ID NO: 407 - protein, 328 aa, Artificial Sequence; identical to SEQ ID NO: 106
  An artificially synthesized sequence

SEQ ID NO: 408 - protein, 328 aa, Artificial Sequence; identical to SEQ ID NO: 107
  An artificially synthesized sequence

SEQ ID NO: 409 - protein, 328 aa, Artificial Sequence; identical to SEQ ID NO: 108
  An artificially synthesized sequence

SEQ ID NO: 410 - protein, 328 aa, Artificial Sequence; identical to SEQ ID NO: 109
  An artificially synthesized sequence

SEQ ID NO: 411 - protein, 328 aa, Artificial Sequence; identical to SEQ ID NO: 110
  An artificially synthesized sequence

SEQ ID NO: 412 - protein, 328 aa, Artificial Sequence; identical to SEQ ID NO: 111
  An artificially synthesized sequence

SEQ ID NO: 413 - protein, 328 aa, Artificial Sequence; identical to SEQ ID NO: 112
  An artificially synthesized sequence

SEQ ID NO: 414 - protein, 328 aa, Artificial Sequence; identical to SEQ ID NO: 113
  An artificially synthesized sequence

SEQ ID NO: 415 - protein, 328 aa, Artificial Sequence; identical to SEQ ID NO: 114
  An artificially synthesized sequence

SEQ ID NO: 416 - protein, 328 aa, Artificial Sequence; identical to SEQ ID NO: 115
  An artificially synthesized sequence

SEQ ID NO: 417 - protein, 328 aa, Artificial Sequence; identical to SEQ ID NO: 116
  An artificially synthesized sequence

SEQ ID NO: 418 - protein, 328 aa, Artificial Sequence; identical to SEQ ID NO: 117
  An artificially synthesized sequence

SEQ ID NO: 419 - protein, 328 aa, Artificial Sequence; identical to SEQ ID NO: 118
  An artificially synthesized sequence

SEQ ID NO: 420 - protein, 328 aa, Artificial Sequence; identical to SEQ ID NO: 119
  An artificially synthesized sequence

SEQ ID NO: 421 - protein, 328 aa, Artificial Sequence; identical to SEQ ID NO: 120
  An artificially synthesized sequence

SEQ ID NO: 422 - protein, 328 aa, Artificial Sequence; identical to SEQ ID NO: 121
  An artificially synthesized sequence

SEQ ID NO: 423 - protein, 328 aa, Artificial Sequence; identical to SEQ ID NO: 122
  An artificially synthesized sequence

SEQ ID NO: 424 - protein, 328 aa, Artificial Sequence; identical to SEQ ID NO: 123
  An artificially synthesized sequence

SEQ ID NO: 425 - protein, 328 aa, Artificial Sequence; identical to SEQ ID NO: 124
  An artificially synthesized sequence

SEQ ID NO: 426 - protein, 328 aa, Artificial Sequence; identical to SEQ ID NO: 125
  An artificially synthesized sequence

SEQ ID NO: 427 - protein, 328 aa, Artificial Sequence; identical to SEQ ID NO: 126
  An artificially synthesized sequence

SEQ ID NO: 428 - protein, 328 aa, Artificial Sequence; identical to SEQ ID NO: 127
  An artificially synthesized sequence

SEQ ID NO: 429 - protein, 328 aa, Artificial Sequence; identical to SEQ ID NO: 128
  An artificially synthesized sequence

SEQ ID NO: 430 - protein, 328 aa, Artificial Sequence; identical to SEQ ID NO: 129
  An artificially synthesized sequence

SEQ ID NO: 431 - protein, 328 aa, Artificial Sequence; identical to SEQ ID NO: 130
  An artificially synthesized sequence

SEQ ID NO: 432 - protein, 328 aa, Artificial Sequence; identical to SEQ ID NO: 131
  An artificially synthesized sequence

SEQ ID NO: 433 - protein, 328 aa, Artificial Sequence; identical to SEQ ID NO: 132
  An artificially synthesized sequence

SEQ ID NO: 434 - protein, 328 aa, Artificial Sequence; identical to SEQ ID NO: 133
  An artificially synthesized sequence

SEQ ID NO: 435 - protein, 328 aa, Artificial Sequence; identical to SEQ ID NO: 134
  An artificially synthesized sequence

SEQ ID NO: 436 - protein, 328 aa, Artificial Sequence; identical to SEQ ID NO: 135
  An artificially synthesized sequence

SEQ ID NO: 437 - protein, 328 aa, Artificial Sequence; identical to SEQ ID NO: 136
  An artificially synthesized sequence

SEQ ID NO: 438 - protein, 328 aa, Artificial Sequence; identical to SEQ ID NO: 137
  An artificially synthesized sequence

SEQ ID NO: 439 - protein, 328 aa, Artificial Sequence; identical to SEQ ID NO: 138
  An artificially synthesized sequence

SEQ ID NO: 440 - protein, 328 aa, Artificial Sequence; identical to SEQ ID NO: 139
  An artificially synthesized sequence

SEQ ID NO: 441 - protein, 328 aa, Artificial Sequence; identical to SEQ ID NO: 140
  An artificially synthesized sequence

SEQ ID NO: 442 - protein, 328 aa, Artificial Sequence; identical to SEQ ID NO: 141
  An artificially synthesized sequence

SEQ ID NO: 443 - protein, 328 aa, Artificial Sequence; identical to SEQ ID NO: 142
  An artificially synthesized sequence

SEQ ID NO: 444 - protein, 328 aa, Artificial Sequence; identical to SEQ ID NO: 143
  An artificially synthesized sequence

SEQ ID NO: 445 - protein, 328 aa, Artificial Sequence; identical to SEQ ID NO: 144
  An artificially synthesized sequence

SEQ ID NO: 446 - protein, 328 aa, Artificial Sequence; identical to SEQ ID NO: 145
  An artificially synthesized sequence

SEQ ID NO: 447 - protein, 328 aa, Artificial Sequence; identical to SEQ ID NO: 146
  An artificially synthesized sequence

SEQ ID NO: 448 - protein, 328 aa, Artificial Sequence; identical to SEQ ID NO: 147
  An artificially synthesized sequence

SEQ ID NO: 449 - protein, 328 aa, Artificial Sequence; identical to SEQ ID NO: 148
  An artificially synthesized sequence

SEQ ID NO: 450 - protein, 328 aa, Artificial Sequence; identical to SEQ ID NO: 149
  An artificially synthesized sequence

SEQ ID NO: 451 - protein, 328 aa, Artificial Sequence; identical to SEQ ID NO: 150
  An artificially synthesized sequence

SEQ ID NO: 452 - protein, 328 aa, Artificial Sequence; identical to SEQ ID NO: 151
  An artificially synthesized sequence

SEQ ID NO: 453 - protein, 328 aa, Artificial Sequence; identical to SEQ ID NO: 152
  An artificially synthesized sequence

SEQ ID NO: 454 - protein, 328 aa, Artificial Sequence; identical to SEQ ID NO: 153
  An artificially synthesized sequence

SEQ ID NO: 455 - protein, 328 aa, Artificial Sequence; identical to SEQ ID NO: 154
  An artificially synthesized sequence

SEQ ID NO: 456 - protein, 328 aa, Artificial Sequence; identical to SEQ ID NO: 155
  An artificially synthesized sequence

SEQ ID NO: 457 - protein, 107 aa, Artificial Sequence; identical to SEQ ID NO: 156
  An artificially synthesized sequence

SEQ ID NO: 458 - protein, 107 aa, Artificial Sequence; identical to SEQ ID NO: 157
  An artificially synthesized sequence

SEQ ID NO: 459 - protein, 107 aa, Artificial Sequence; identical to SEQ ID NO: 158
  An artificially synthesized sequence

SEQ ID NO: 460 - protein, 107 aa, Artificial Sequence; identical to SEQ ID NO: 159
  An artificially synthesized sequence

SEQ ID NO: 461 - protein, 107 aa, Artificial Sequence; identical to SEQ ID NO: 160
  An artificially synthesized sequence

SEQ ID NO: 462 - protein, 107 aa, Artificial Sequence; identical to SEQ ID NO: 161
  An artificially synthesized sequence

SEQ ID NO: 463 - protein, 107 aa, Artificial Sequence; identical to SEQ ID NO: 162
  An artificially synthesized sequence

SEQ ID NO: 464 - protein, 107 aa, Artificial Sequence; identical to SEQ ID NO: 163
  An artificially synthesized sequence

SEQ ID NO: 465 - protein, 107 aa, Artificial Sequence; identical to SEQ ID NO: 164
  An artificially synthesized sequence

SEQ ID NO: 466 - protein, 107 aa, Artificial Sequence; identical to SEQ ID NO: 165
  An artificially synthesized sequence

SEQ ID NO: 467 - protein, 107 aa, Artificial Sequence; identical to SEQ ID NO: 166
  An artificially synthesized sequence

SEQ ID NO: 468 - protein, 107 aa, Artificial Sequence; identical to SEQ ID NO: 167
  An artificially synthesized sequence

SEQ ID NO: 469 - protein, 107 aa, Artificial Sequence; identical to SEQ ID NO: 168
  An artificially synthesized sequence

SEQ ID NO: 470 - protein, 107 aa, Artificial Sequence; identical to SEQ ID NO: 169
  An artificially synthesized sequence

SEQ ID NO: 471 - protein, 107 aa, Artificial Sequence; identical to SEQ ID NO: 170
  An artificially synthesized sequence

SEQ ID NO: 472 - protein, 107 aa, Artificial Sequence; identical to SEQ ID NO: 171
  An artificially synthesized sequence

SEQ ID NO: 473 - protein, 107 aa, Artificial Sequence; identical to SEQ ID NO: 172
  An artificially synthesized sequence

SEQ ID NO: 474 - protein, 107 aa, Artificial Sequence; identical to SEQ ID NO: 173
  An artificially synthesized sequence

SEQ ID NO: 475 - protein, 107 aa, Artificial Sequence; identical to SEQ ID NO: 204
  An artificially synthesized sequence

SEQ ID NO: 476 - protein, 107 aa, Artificial Sequence; identical to SEQ ID NO: 205
  An artificially synthesized sequence

SEQ ID NO: 477 - protein, 107 aa, Artificial Sequence; identical to SEQ ID NO: 206
  An artificially synthesized sequence

SEQ ID NO: 478 - protein, 107 aa, Artificial Sequence; identical to SEQ ID NO: 207
  An artificially synthesized sequence

SEQ ID NO: 479 - protein, 107 aa, Artificial Sequence; identical to SEQ ID NO: 208
  An artificially synthesized sequence

SEQ ID NO: 480 - protein, 107 aa, Artificial Sequence; identical to SEQ ID NO: 209
  An artificially synthesized sequence

SEQ ID NO: 481 - protein, 107 aa, Artificial Sequence; identical to SEQ ID NO: 210
  An artificially synthesized sequence

SEQ ID NO: 482 - protein, 107 aa, Artificial Sequence; identical to SEQ ID NO: 211
  An artificially synthesized sequence

SEQ ID NO: 483 - protein, 107 aa, Artificial Sequence; identical to SEQ ID NO: 212
  An artificially synthesized sequence

SEQ ID NO: 484 - protein, 107 aa, Artificial Sequence; identical to SEQ ID NO: 213
  An artificially synthesized sequence

SEQ ID NO: 485 - protein, 107 aa, Artificial Sequence; identical to SEQ ID NO: 174
  An artificially synthesized sequence

SEQ ID NO: 486 - protein, 107 aa, Artificial Sequence; identical to SEQ ID NO: 175
  An artificially synthesized sequence

SEQ ID NO: 487 - protein, 107 aa, Artificial Sequence; identical to SEQ ID NO: 176
  An artificially synthesized sequence

SEQ ID NO: 488 - protein, 107 aa, Artificial Sequence; identical to SEQ ID NO: 177
  An artificially synthesized sequence

SEQ ID NO: 489 - protein, 107 aa, Artificial Sequence; identical to SEQ ID NO: 178
  An artificially synthesized sequence

SEQ ID NO: 490 - protein, 107 aa, Artificial Sequence; identical to SEQ ID NO: 179
  An artificially synthesized sequence

SEQ ID NO: 491 - protein, 107 aa, Artificial Sequence; identical to SEQ ID NO: 180
  An artificially synthesized sequence

SEQ ID NO: 492 - protein, 107 aa, Artificial Sequence; identical to SEQ ID NO: 181
  An artificially synthesized sequence

SEQ ID NO: 493 - protein, 107 aa, Artificial Sequence; identical to SEQ ID NO: 182
  An artificially synthesized sequence

SEQ ID NO: 494 - protein, 107 aa, Artificial Sequence; identical to SEQ ID NO: 183
  An artificially synthesized sequence

SEQ ID NO: 495 - protein, 107 aa, Artificial Sequence; identical to SEQ ID NO: 184
  An artificially synthesized sequence

SEQ ID NO: 496 - protein, 107 aa, Artificial Sequence; identical to SEQ ID NO: 185
  An artificially synthesized sequence

SEQ ID NO: 497 - protein, 107 aa, Artificial Sequence; identical to SEQ ID NO: 186
  An artificially synthesized sequence

SEQ ID NO: 498 - protein, 107 aa, Artificial Sequence; identical to SEQ ID NO: 187
  An artificially synthesized sequence

SEQ ID NO: 499 - protein, 107 aa, Artificial Sequence; identical to SEQ ID NO: 188
  An artificially synthesized sequence

SEQ ID NO: 500 - protein, 107 aa, Artificial Sequence; identical to SEQ ID NO: 189
  An artificially synthesized sequence

SEQ ID NO: 501 - protein, 107 aa, Artificial Sequence; identical to SEQ ID NO: 190
  An artificially synthesized sequence

SEQ ID NO: 502 - protein, 107 aa, Artificial Sequence; identical to SEQ ID NO: 191
  An artificially synthesized sequence

SEQ ID NO: 503 - protein, 107 aa, Artificial Sequence; identical to SEQ ID NO: 192
  An artificially synthesized sequence

SEQ ID NO: 504 - protein, 107 aa, Artificial Sequence; identical to SEQ ID NO: 193
  An artificially synthesized sequence

SEQ ID NO: 505 - protein, 107 aa, Artificial Sequence; identical to SEQ ID NO: 214
  An artificially synthesized sequence

SEQ ID NO: 506 - protein, 107 aa, Artificial Sequence; identical to SEQ ID NO: 215
  An artificially synthesized sequence

SEQ ID NO: 507 - protein, 107 aa, Artificial Sequence; identical to SEQ ID NO: 194
  An artificially synthesized sequence

SEQ ID NO: 508 - protein, 107 aa, Artificial Sequence; identical to SEQ ID NO: 195
  An artificially synthesized sequence

SEQ ID NO: 509 - protein, 107 aa, Artificial Sequence; identical to SEQ ID NO: 196
  An artificially synthesized sequence

SEQ ID NO: 510 - protein, 107 aa, Artificial Sequence; identical to SEQ ID NO: 197
  An artificially synthesized sequence

SEQ ID NO: 511 - protein, 107 aa, Artificial Sequence; identical to SEQ ID NO: 198
  An artificially synthesized sequence

SEQ ID NO: 512 - protein, 107 aa, Artificial Sequence; identical to SEQ ID NO: 199
  An artificially synthesized sequence

SEQ ID NO: 513 - protein, 107 aa, Artificial Sequence; identical to SEQ ID NO: 200
  An artificially synthesized sequence

SEQ ID NO: 514 - protein, 107 aa, Artificial Sequence; identical to SEQ ID NO: 201
  An artificially synthesized sequence

SEQ ID NO: 515 - protein, 107 aa, Artificial Sequence; identical to SEQ ID NO: 202
  An artificially synthesized sequence

SEQ ID NO: 516 - protein, 107 aa, Artificial Sequence; identical to SEQ ID NO: 203
  An artificially synthesized sequence

SEQ ID NO: 517 - protein, 107 aa, Artificial Sequence; identical to SEQ ID NO: 216
  An artificially synthesized sequence

SEQ ID NO: 518 - protein, 107 aa, Artificial Sequence; identical to SEQ ID NO: 217
  An artificially synthesized sequence

SEQ ID NO: 519 - protein, 107 aa, Artificial Sequence; identical to SEQ ID NO: 218
  An artificially synthesized sequence

SEQ ID NO: 520 - protein, 107 aa, Artificial Sequence; identical to SEQ ID NO: 219
  An artificially synthesized sequence

SEQ ID NO: 521 - protein, 107 aa, Artificial Sequence; identical to SEQ ID NO: 220
  An artificially synthesized sequence

SEQ ID NO: 522 - protein, 107 aa, Artificial Sequence; identical to SEQ ID NO: 221
  An artificially synthesized sequence

SEQ ID NO: 523 - protein, 107 aa, Artificial Sequence; identical to SEQ ID NO: 222
  An artificially synthesized sequence

SEQ ID NO: 524 - protein, 107 aa, Artificial Sequence; identical to SEQ ID NO: 223
  An artificially synthesized sequence

SEQ ID NO: 525 - protein, 107 aa, Artificial Sequence; identical to SEQ ID NO: 224
  An artificially synthesized sequence

SEQ ID NO: 526 - protein, 107 aa, Artificial Sequence; identical to SEQ ID NO: 225
  An artificially synthesized sequence

SEQ ID NO: 527 - protein, 107 aa, Artificial Sequence; identical to SEQ ID NO: 226
  An artificially synthesized sequence

SEQ ID NO: 528 - protein, 107 aa, Artificial Sequence; identical to SEQ ID NO: 227
  An artificially synthesized sequence

SEQ ID NO: 529 - protein, 107 aa, Artificial Sequence; identical to SEQ ID NO: 228
  An artificially synthesized sequence

SEQ ID NO: 530 - protein, 107 aa, Artificial Sequence; identical to SEQ ID NO: 229
  An artificially synthesized sequence

SEQ ID NO: 531 - protein, 107 aa, Artificial Sequence; identical to SEQ ID NO: 230
  An artificially synthesized sequence

SEQ ID NO: 532 - protein, 107 aa, Artificial Sequence; identical to SEQ ID NO: 231
  An artificially synthesized sequence

SEQ ID NO: 533 - protein, 107 aa, Artificial Sequence; identical to SEQ ID NO: 232
  An artificially synthesized sequence

SEQ ID NO: 534 - protein, 107 aa, Artificial Sequence; identical to SEQ ID NO: 233
  An artificially synthesized sequence

SEQ ID NO: 535 - protein, 107 aa, Artificial Sequence; identical to SEQ ID NO: 234
  An artificially synthesized sequence

SEQ ID NO: 536 - protein, 107 aa, Artificial Sequence; identical to SEQ ID NO: 235
  An artificially synthesized sequence

SEQ ID NO: 537 - protein, 107 aa, Artificial Sequence; identical to SEQ ID NO: 236
  An artificially synthesized sequence

SEQ ID NO: 538 - protein, 107 aa, Artificial Sequence; identical to SEQ ID NO: 237
  An artificially synthesized sequence

SEQ ID NO: 539 - protein, 107 aa, Artificial Sequence; identical to SEQ ID NO: 238
  An artificially synthesized sequence

SEQ ID NO: 540 - protein, 107 aa, Artificial Sequence; identical to SEQ ID NO: 239
  An artificially synthesized sequence

SEQ ID NO: 541 - protein, 107 aa, Artificial Sequence; identical to SEQ ID NO: 240
  An artificially synthesized sequence

SEQ ID NO: 542 - protein, 107 aa, Artificial Sequence; identical to SEQ ID NO: 241
  An artificially synthesized sequence

SEQ ID NO: 543 - protein, 107 aa, Artificial Sequence; identical to SEQ ID NO: 242
  An artificially synthesized sequence

SEQ ID NO: 544 - protein, 107 aa, Artificial Sequence; identical to SEQ ID NO: 243
  An artificially synthesized sequence

SEQ ID NO: 545 - protein, 107 aa, Artificial Sequence; identical to SEQ ID NO: 244
  An artificially synthesized sequence

SEQ ID NO: 546 - protein, 107 aa, Artificial Sequence; identical to SEQ ID NO: 245
  An artificially synthesized sequence

SEQ ID NO: 547 - protein, 107 aa, Artificial Sequence; identical to SEQ ID NO: 246
  An artificially synthesized sequence

SEQ ID NO: 548 - protein, 107 aa, Artificial Sequence; identical to SEQ ID NO: 247
  An artificially synthesized sequence

SEQ ID NO: 549 - protein, 107 aa, Artificial Sequence; identical to SEQ ID NO: 248
  An artificially synthesized sequence

SEQ ID NO: 550 - protein, 107 aa, Artificial Sequence; identical to SEQ ID NO: 249
  An artificially synthesized sequence

SEQ ID NO: 551 - protein, 107 aa, Artificial Sequence; identical to SEQ ID NO: 250
  An artificially synthesized sequence

SEQ ID NO: 552 - protein, 107 aa, Artificial Sequence; identical to SEQ ID NO: 251
  An artificially synthesized sequence

SEQ ID NO: 553 - protein, 107 aa, Artificial Sequence; identical to SEQ ID NO: 252
  An artificially synthesized sequence

SEQ ID NO: 554 - protein, 107 aa, Artificial Sequence; identical to SEQ ID NO: 253
  An artificially synthesized sequence

SEQ ID NO: 555 - protein, 107 aa, Artificial Sequence; identical to SEQ ID NO: 254
  An artificially synthesized sequence

SEQ ID NO: 556 - protein, 107 aa, Artificial Sequence; identical to SEQ ID NO: 255
  An artificially synthesized sequence

SEQ ID NO: 557 - protein, 107 aa, Artificial Sequence; identical to SEQ ID NO: 256
  An artificially synthesized sequence

SEQ ID NO: 558 - protein, 107 aa, Artificial Sequence; identical to SEQ ID NO: 257
  An artificially synthesized sequence

SEQ ID NO: 559 - protein, 107 aa, Artificial Sequence; identical to SEQ ID NO: 258
  An artificially synthesized sequence

SEQ ID NO: 560 - protein, 107 aa, Artificial Sequence; identical to SEQ ID NO: 259
  An artificially synthesized sequence

SEQ ID NO: 561 - protein, 107 aa, Artificial Sequence; identical to SEQ ID NO: 260
  An artificially synthesized sequence

SEQ ID NO: 562 - protein, 107 aa, Artificial Sequence; identical to SEQ ID NO: 261
  An artificially synthesized sequence

SEQ ID NO: 563 - protein, 107 aa, Artificial Sequence; identical to SEQ ID NO: 262
  An artificially synthesized sequence

SEQ ID NO: 564 - protein, 107 aa, Artificial Sequence; identical to SEQ ID NO: 263
  An artificially synthesized sequence

SEQ ID NO: 565 - protein, 107 aa, Artificial Sequence; identical to SEQ ID NO: 264
  An artificially synthesized sequence

SEQ ID NO: 566 - protein, 107 aa, Artificial Sequence; identical to SEQ ID NO: 265
  An artificially synthesized sequence

SEQ ID NO: 567 - protein, 107 aa, Artificial Sequence; identical to SEQ ID NO: 266
  An artificially synthesized sequence

SEQ ID NO: 568 - protein, 107 aa, Artificial Sequence; identical to SEQ ID NO: 267
  An artificially synthesized sequence

SEQ ID NO: 569 - protein, 107 aa, Artificial Sequence; identical to SEQ ID NO: 268
  An artificially synthesized sequence

SEQ ID NO: 570 - protein, 107 aa, Artificial Sequence; identical to SEQ ID NO: 269
  An artificially synthesized sequence

SEQ ID NO: 571 - protein, 107 aa, Artificial Sequence; identical to SEQ ID NO: 270
  An artificially synthesized sequence

SEQ ID NO: 572 - protein, 107 aa, Artificial Sequence; identical to SEQ ID NO: 271
  An artificially synthesized sequence

SEQ ID NO: 573 - protein, 107 aa, Artificial Sequence; identical to SEQ ID NO: 272
  An artificially synthesized sequence

SEQ ID NO: 574 - protein, 107 aa, Artificial Sequence; identical to SEQ ID NO: 273
  An artificially synthesized sequence

SEQ ID NO: 575 - protein, 107 aa, Artificial Sequence; identical to SEQ ID NO: 274
  An artificially synthesized sequence

SEQ ID NO: 576 - protein, 107 aa, Artificial Sequence; identical to SEQ ID NO: 275
  An artificially synthesized sequence

SEQ ID NO: 577 - protein, 107 aa, Artificial Sequence; identical to SEQ ID NO: 276
  An artificially synthesized sequence

SEQ ID NO: 578 - protein, 107 aa, Artificial Sequence; identical to SEQ ID NO: 277
  An artificially synthesized sequence

SEQ ID NO: 579 - protein, 107 aa, Artificial Sequence; identical to SEQ ID NO: 278
  An artificially synthesized sequence

SEQ ID NO: 580 - protein, 107 aa, Artificial Sequence; identical to SEQ ID NO: 279
  An artificially synthesized sequence

SEQ ID NO: 581 - protein, 107 aa, Artificial Sequence; identical to SEQ ID NO: 280
  An artificially synthesized sequence

SEQ ID NO: 582 - protein, 107 aa, Artificial Sequence; identical to SEQ ID NO: 281
  An artificially synthesized sequence

SEQ ID NO: 583 - protein, 107 aa, Artificial Sequence; identical to SEQ ID NO: 282
  An artificially synthesized sequence

SEQ ID NO: 584 - protein, 107 aa, Artificial Sequence; identical to SEQ ID NO: 283
  An artificially synthesized sequence

SEQ ID NO: 585 - protein, 107 aa, Artificial Sequence; identical to SEQ ID NO: 284
  An artificially synthesized sequence

SEQ ID NO: 586 - protein, 107 aa, Artificial Sequence; identical to SEQ ID NO: 285
  An artificially synthesized sequence

SEQ ID NO: 587 - protein, 107 aa, Artificial Sequence; identical to SEQ ID NO: 286
  An artificially synthesized sequence

SEQ ID NO: 588 - protein, 107 aa, Artificial Sequence; identical to SEQ ID NO: 287
  An artificially synthesized sequence

SEQ ID NO: 589 - protein, 107 aa, Artificial Sequence; identical to SEQ ID NO: 288
  An artificially synthesized sequence

SEQ ID NO: 590 - protein, 107 aa, Artificial Sequence; identical to SEQ ID NO: 289
  An artificially synthesized sequence

SEQ ID NO: 591 - protein, 107 aa, Artificial Sequence; identical to SEQ ID NO: 290
  An artificially synthesized sequence

SEQ ID NO: 592 - protein, 107 aa, Artificial Sequence; identical to SEQ ID NO: 291
  An artificially synthesized sequence

SEQ ID NO: 593 - protein, 107 aa, Artificial Sequence; identical to SEQ ID NO: 292
  An artificially synthesized sequence

SEQ ID NO: 594 - protein, 107 aa, Artificial Sequence; identical to SEQ ID NO: 293
  An artificially synthesized sequence

SEQ ID NO: 595 - protein, 107 aa, Artificial Sequence; identical to SEQ ID NO: 294
  An artificially synthesized sequence

SEQ ID NO: 596 - protein, 107 aa, Artificial Sequence; identical to SEQ ID NO: 295
  An artificially synthesized sequence

SEQ ID NO: 597 - protein, 107 aa, Artificial Sequence; identical to SEQ ID NO: 296
  An artificially synthesized sequence

SEQ ID NO: 598 - protein, 107 aa, Artificial Sequence; identical to SEQ ID NO: 297
  An artificially synthesized sequence

SEQ ID NO: 599 - protein, 107 aa, Artificial Sequence; identical to SEQ ID NO: 298
  An artificially synthesized sequence

SEQ ID NO: 600 - protein, 107 aa, Artificial Sequence; identical to SEQ ID NO: 299
  An artificially synthesized sequence

SEQ ID NO: 601 - protein, 107 aa, Artificial Sequence; identical to SEQ ID NO: 300
  An artificially synthesized sequence

SEQ ID NO: 602 - protein, 107 aa, Artificial Sequence; identical to SEQ ID NO: 301
  An artificially synthesized sequence

SEQ ID NO: 603 - protein, 107 aa, Artificial Sequence; identical to SEQ ID NO: 302
  An artificially synthesized sequence

SEQ ID NO: 604 - protein, 107 aa, Artificial Sequence; identical to SEQ ID NO: 303
  An artificially synthesized sequence

SEQ ID NO: 605 - protein, 107 aa, Artificial Sequence; identical to SEQ ID NO: 304
  An artificially synthesized sequence

SEQ ID NO: 606 - protein, 107 aa, Artificial Sequence; identical to SEQ ID NO: 305
  An artificially synthesized sequence

SEQ ID NO: 607 - protein, 107 aa, Artificial Sequence; identical to SEQ ID NO: 306
  An artificially synthesized sequence

SEQ ID NO: 608 - protein, 107 aa, Artificial Sequence; identical to SEQ ID NO: 307
  An artificially synthesized sequence

SEQ ID NO: 609 - protein, 107 aa, Artificial Sequence; identical to SEQ ID NO: 308
  An artificially synthesized sequence

SEQ ID NO: 610 - protein, 107 aa, Artificial Sequence; identical to SEQ ID NO: 309
  An artificially synthesized sequence

SEQ ID NO: 611 - protein, 325 aa, Artificial Sequence
  An artificially synthesized sequence
CSTKGPSVFPLAPCSRSTSESTAALGCLVKDYFPEPVTVSWNSGALTSGVHTFPAVLQSSGLYSLSSVVTVPSSSLGTQTYTCNVDHKPSNTKVDKRVESKYGPPCPPCPAPEFRRGPSVFLFPPKPKDTLMISRTPEVTCVVVDVSQEDPEVQFNWYVDGVEVHNAKTKPREEQYNSTYRVVSVLTVLHQDWLNGKEYKCKVSNKGLPSSIEKTISKAKGQPREPQVYTLPPSQEEMTKNQVSLTCLVKGFYPSDIAVEWESNGQPENNYKTTPPVLDSDGSFFLYSRLTVDKSRWQEGNVFSCSVMHEALHNHYTQKSLSLSP

SEQ ID NO: 612 - protein, 325 aa, Artificial Sequence
  An artificially synthesized sequence
ACTKGPSVFPLAPCSRSTSESTAALGCLVKDYFPEPVTVSWNSGALTSGVHTFPAVLQSSGLYSLSSVVTVPSSSLGTQTYTCNVDHKPSNTKVDKRVESKYGPPCPPCPAPEFRRGPSVFLFPPKPKDTLMISRTPEVTCVVVDVSQEDPEVQFNWYVDGVEVHNAKTKPREEQYNSTYRVVSVLTVLHQDWLNGKEYKCKVSNKGLPSSIEKTISKAKGQPREPQVYTLPPSQEEMTKNQVSLTCLVKGFYPSDIAVEWESNGQPENNYKTTPPVLDSDGSFFLYSRLTVDKSRWQEGNVFSCSVMHEALHNHYTQKSLSLSP

SEQ ID NO: 613 - protein, 325 aa, Artificial Sequence
  An artificially synthesized sequence
ASCKGPSVFPLAPCSRSTSESTAALGCLVKDYFPEPVTVSWNSGALTSGVHTFPAVLQSSGLYSLSSVVTVPSSSLGTQTYTCNVDHKPSNTKVDKRVESKYGPPCPPCPAPEFRRGPSVFLFPPKPKDTLMISRTPEVTCVVVDVSQEDPEVQFNWYVDGVEVHNAKTKPREEQYNSTYRVVSVLTVLHQDWLNGKEYKCKVSNKGLPSSIEKTISKAKGQPREPQVYTLPPSQEEMTKNQVSLTCLVKGFYPSDIAVEWESNGQPENNYKTTPPVLDSDGSFFLYSRLTVDKSRWQEGNVFSCSVMHEALHNHYTQKSLSLSP

SEQ ID NO: 614 - protein, 325 aa, Artificial Sequence
  An artificially synthesized sequence
ASTCGPSVFPLAPCSRSTSESTAALGCLVKDYFPEPVTVSWNSGALTSGVHTFPAVLQSSGLYSLSSVVTVPSSSLGTQTYTCNVDHKPSNTKVDKRVESKYGPPCPPCPAPEFRRGPSVFLFPPKPKDTLMISRTPEVTCVVVDVSQEDPEVQFNWYVDGVEVHNAKTKPREEQYNSTYRVVSVLTVLHQDWLNGKEYKCKVSNKGLPSSIEKTISKAKGQPREPQVYTLPPSQEEMTKNQVSLTCLVKGFYPSDIAVEWESNGQPENNYKTTPPVLDSDGSFFLYSRLTVDKSRWQEGNVFSCSVMHEALHNHYTQKSLSLSP

SEQ ID NO: 615 - protein, 325 aa, Artificial Sequence
  An artificially synthesized sequence
ASTKCPSVFPLAPCSRSTSESTAALGCLVKDYFPEPVTVSWNSGALTSGVHTFPAVLQSSGLYSLSSVVTVPSSSLGTQTYTCNVDHKPSNTKVDKRVESKYGPPCPPCPAPEFRRGPSVFLFPPKPKDTLMISRTPEVTCVVVDVSQEDPEVQFNWYVDGVEVHNAKTKPREEQYNSTYRVVSVLTVLHQDWLNGKEYKCKVSNKGLPSSIEKTISKAKGQPREPQVYTLPPSQEEMTKNQVSLTCLVKGFYPSDIAVEWESNGQPENNYKTTPPVLDSDGSFFLYSRLTVDKSRWQEGNVFSCSVMHEALHNHYTQKSLSLSP

SEQ ID NO: 616 - protein, 325 aa, Artificial Sequence
  An artificially synthesized sequence
ASTKGCSVFPLAPCSRSTSESTAALGCLVKDYFPEPVTVSWNSGALTSGVHTFPAVLQSSGLYSLSSVVTVPSSSLGTQTYTCNVDHKPSNTKVDKRVESKYGPPCPPCPAPEFRRGPSVFLFPPKPKDTLMISRTPEVTCVVVDVSQEDPEVQFNWYVDGVEVHNAKTKPREEQYNSTYRVVSVLTVLHQDWLNGKEYKCKVSNKGLPSSIEKTISKAKGQPREPQVYTLPPSQEEMTKNQVSLTCLVKGFYPSDIAVEWESNGQPENNYKTTPPVLDSDGSFFLYSRLTVDKSRWQEGNVFSCSVMHEALHNHYTQKSLSLSP

SEQ ID NO: 617 - protein, 325 aa, Artificial Sequence
  An artificially synthesized sequence
ASTKGPCVFPLAPCSRSTSESTAALGCLVKDYFPEPVTVSWNSGALTSGVHTFPAVLQSSGLYSLSSVVTVPSSSLGTQTYTCNVDHKPSNTKVDKRVESKYGPPCPPCPAPEFRRGPSVFLFPPKPKDTLMISRTPEVTCVVVDVSQEDPEVQFNWYVDGVEVHNAKTKPREEQYNSTYRVVSVLTVLHQDWLNGKEYKCKVSNKGLPSSIEKTISKAKGQPREPQVYTLPPSQEEMTKNQVSLTCLVKGFYPSDIAVEWESNGQPENNYKTTPPVLDSDGSFFLYSRLTVDKSRWQEGNVFSCSVMHEALHNHYTQKSLSLSP

SEQ ID NO: 618 - protein, 325 aa, Artificial Sequence
  An artificially synthesized sequence
ASTKGPSCFPLAPCSRSTSESTAALGCLVKDYFPEPVTVSWNSGALTSGVHTFPAVLQSSGLYSLSSVVTVPSSSLGTQTYTCNVDHKPSNTKVDKRVESKYGPPCPPCPAPEFRRGPSVFLFPPKPKDTLMISRTPEVTCVVVDVSQEDPEVQFNWYVDGVEVHNAKTKPREEQYNSTYRVVSVLTVLHQDWLNGKEYKCKVSNKGLPSSIEKTISKAKGQPREPQVYTLPPSQEEMTKNQVSLTCLVKGFYPSDIAVEWESNGQPENNYKTTPPVLDSDGSFFLYSRLTVDKSRWQEGNVFSCSVMHEALHNHYTQKSLSLSP

SEQ ID NO: 619 - protein, 325 aa, Artificial Sequence
  An artificially synthesized sequence
ASTKGPSVCPLAPCSRSTSESTAALGCLVKDYFPEPVTVSWNSGALTSGVHTFPAVLQSSGLYSLSSVVTVPSSSLGTQTYTCNVDHKPSNTKVDKRVESKYGPPCPPCPAPEFRRGPSVFLFPPKPKDTLMISRTPEVTCVVVDVSQEDPEVQFNWYVDGVEVHNAKTKPREEQYNSTYRVVSVLTVLHQDWLNGKEYKCKVSNKGLPSSIEKTISKAKGQPREPQVYTLPPSQEEMTKNQVSLTCLVKGFYPSDIAVEWESNGQPENNYKTTPPVLDSDGSFFLYSRLTVDKSRWQEGNVFSCSVMHEALHNHYTQKSLSLSP

SEQ ID NO: 620 - protein, 325 aa, Artificial Sequence
  An artificially synthesized sequence
ASTKGPSVFCLAPCSRSTSESTAALGCLVKDYFPEPVTVSWNSGALTSGVHTFPAVLQSSGLYSLSSVVTVPSSSLGTQTYTCNVDHKPSNTKVDKRVESKYGPPCPPCPAPEFRRGPSVFLFPPKPKDTLMISRTPEVTCVVVDVSQEDPEVQFNWYVDGVEVHNAKTKPREEQYNSTYRVVSVLTVLHQDWLNGKEYKCKVSNKGLPSSIEKTISKAKGQPREPQVYTLPPSQEEMTKNQVSLTCLVKGFYPSDIAVEWESNGQPENNYKTTPPVLDSDGSFFLYSRLTVDKSRWQEGNVFSCSVMHEALHNHYTQKSLSLSP

SEQ ID NO: 621 - protein, 325 aa, Artificial Sequence
  An artificially synthesized sequence
ASTKGPSVFPLAPCCRSTSESTAALGCLVKDYFPEPVTVSWNSGALTSGVHTFPAVLQSSGLYSLSSVVTVPSSSLGTQTYTCNVDHKPSNTKVDKRVESKYGPPCPPCPAPEFRRGPSVFLFPPKPKDTLMISRTPEVTCVVVDVSQEDPEVQFNWYVDGVEVHNAKTKPREEQYNSTYRVVSVLTVLHQDWLNGKEYKCKVSNKGLPSSIEKTISKAKGQPREPQVYTLPPSQEEMTKNQVSLTCLVKGFYPSDIAVEWESNGQPENNYKTTPPVLDSDGSFFLYSRLTVDKSRWQEGNVFSCSVMHEALHNHYTQKSLSLSP

SEQ ID NO: 622 - protein, 325 aa, Artificial Sequence
  An artificially synthesized sequence
ASTKGPSVFPLAPCSCSTSESTAALGCLVKDYFPEPVTVSWNSGALTSGVHTFPAVLQSSGLYSLSSVVTVPSSSLGTQTYTCNVDHKPSNTKVDKRVESKYGPPCPPCPAPEFRRGPSVFLFPPKPKDTLMISRTPEVTCVVVDVSQEDPEVQFNWYVDGVEVHNAKTKPREEQYNSTYRVVSVLTVLHQDWLNGKEYKCKVSNKGLPSSIEKTISKAKGQPREPQVYTLPPSQEEMTKNQVSLTCLVKGFYPSDIAVEWESNGQPENNYKTTPPVLDSDGSFFLYSRLTVDKSRWQEGNVFSCSVMHEALHNHYTQKSLSLSP

SEQ ID NO: 623 - protein, 325 aa, Artificial Sequence
  An artificially synthesized sequence
ASTKGPSVFPLAPCSRCTSESTAALGCLVKDYFPEPVTVSWNSGALTSGVHTFPAVLQSSGLYSLSSVVTVPSSSLGTQTYTCNVDHKPSNTKVDKRVESKYGPPCPPCPAPEFRRGPSVFLFPPKPKDTLMISRTPEVTCVVVDVSQEDPEVQFNWYVDGVEVHNAKTKPREEQYNSTYRVVSVLTVLHQDWLNGKEYKCKVSNKGLPSSIEKTISKAKGQPREPQVYTLPPSQEEMTKNQVSLTCLVKGFYPSDIAVEWESNGQPENNYKTTPPVLDSDGSFFLYSRLTVDKSRWQEGNVFSCSVMHEALHNHYTQKSLSLSP

SEQ ID NO: 624 - protein, 325 aa, Artificial Sequence
  An artificially synthesized sequence
ASTKGPSVFPLAPCSRSCSESTAALGCLVKDYFPEPVTVSWNSGALTSGVHTFPAVLQSSGLYSLSSVVTVPSSSLGTQTYTCNVDHKPSNTKVDKRVESKYGPPCPPCPAPEFRRGPSVFLFPPKPKDTLMISRTPEVTCVVVDVSQEDPEVQFNWYVDGVEVHNAKTKPREEQYNSTYRVVSVLTVLHQDWLNGKEYKCKVSNKGLPSSIEKTISKAKGQPREPQVYTLPPSQEEMTKNQVSLTCLVKGFYPSDIAVEWESNGQPENNYKTTPPVLDSDGSFFLYSRLTVDKSRWQEGNVFSCSVMHEALHNHYTQKSLSLSP

SEQ ID NO: 625 - protein, 325 aa, Artificial Sequence
  An artificially synthesized sequence
ASTKGPSVFPLAPCSRSTCESTAALGCLVKDYFPEPVTVSWNSGALTSGVHTFPAVLQSSGLYSLSSVVTVPSSSLGTQTYTCNVDHKPSNTKVDKRVESKYGPPCPPCPAPEFRRGPSVFLFPPKPKDTLMISRTPEVTCVVVDVSQEDPEVQFNWYVDGVEVHNAKTKPREEQYNSTYRVVSVLTVLHQDWLNGKEYKCKVSNKGLPSSIEKTISKAKGQPREPQVYTLPPSQEEMTKNQVSLTCLVKGFYPSDIAVEWESNGQPENNYKTTPPVLDSDGSFFLYSRLTVDKSRWQEGNVFSCSVMHEALHNHYTQKSLSLSP

SEQ ID NO: 626 - protein, 325 aa, Artificial Sequence
  An artificially synthesized sequence
ASTKGPSVFPLAPCSRSTSCSTAALGCLVKDYFPEPVTVSWNSGALTSGVHTFPAVLQSSGLYSLSSVVTVPSSSLGTQTYTCNVDHKPSNTKVDKRVESKYGPPCPPCPAPEFRRGPSVFLFPPKPKDTLMISRTPEVTCVVVDVSQEDPEVQFNWYVDGVEVHNAKTKPREEQYNSTYRVVSVLTVLHQDWLNGKEYKCKVSNKGLPSSIEKTISKAKGQPREPQVYTLPPSQEEMTKNQVSLTCLVKGFYPSDIAVEWESNGQPENNYKTTPPVLDSDGSFFLYSRLTVDKSRWQEGNVFSCSVMHEALHNHYTQKSLSLSP

SEQ ID NO: 627 - protein, 325 aa, Artificial Sequence
  An artificially synthesized sequence
ASTKGPSVFPLAPCSRSTSECTAALGCLVKDYFPEPVTVSWNSGALTSGVHTFPAVLQSSGLYSLSSVVTVPSSSLGTQTYTCNVDHKPSNTKVDKRVESKYGPPCPPCPAPEFRRGPSVFLFPPKPKDTLMISRTPEVTCVVVDVSQEDPEVQFNWYVDGVEVHNAKTKPREEQYNSTYRVVSVLTVLHQDWLNGKEYKCKVSNKGLPSSIEKTISKAKGQPREPQVYTLPPSQEEMTKNQVSLTCLVKGFYPSDIAVEWESNGQPENNYKTTPPVLDSDGSFFLYSRLTVDKSRWQEGNVFSCSVMHEALHNHYTQKSLSLSP

SEQ ID NO: 628 - protein, 325 aa, Artificial Sequence
  An artificially synthesized sequence
ASTKGPSVFPLAPCSRSTSESCAALGCLVKDYFPEPVTVSWNSGALTSGVHTFPAVLQSSGLYSLSSVVTVPSSSLGTQTYTCNVDHKPSNTKVDKRVESKYGPPCPPCPAPEFRRGPSVFLFPPKPKDTLMISRTPEVTCVVVDVSQEDPEVQFNWYVDGVEVHNAKTKPREEQYNSTYRVVSVLTVLHQDWLNGKEYKCKVSNKGLPSSIEKTISKAKGQPREPQVYTLPPSQEEMTKNQVSLTCLVKGFYPSDIAVEWESNGQPENNYKTTPPVLDSDGSFFLYSRLTVDKSRWQEGNVFSCSVMHEALHNHYTQKSLSLSP

SEQ ID NO: 629 - protein, 325 aa, Artificial Sequence
  An artificially synthesized sequence
ASTKGPSVFPLAPCSRSTSESTCALGCLVKDYFPEPVTVSWNSGALTSGVHTFPAVLQSSGLYSLSSVVTVPSSSLGTQTYTCNVDHKPSNTKVDKRVESKYGPPCPPCPAPEFRRGPSVFLFPPKPKDTLMISRTPEVTCVVVDVSQEDPEVQFNWYVDGVEVHNAKTKPREEQYNSTYRVVSVLTVLHQDWLNGKEYKCKVSNKGLPSSIEKTISKAKGQPREPQVYTLPPSQEEMTKNQVSLTCLVKGFYPSDIAVEWESNGQPENNYKTTPPVLDSDGSFFLYSRLTVDKSRWQEGNVFSCSVMHEALHNHYTQKSLSLSP

SEQ ID NO: 630 - protein, 325 aa, Artificial Sequence
  An artificially synthesized sequence
ASTKGPSVFPLAPCSRSTSESTACLGCLVKDYFPEPVTVSWNSGALTSGVHTFPAVLQSSGLYSLSSVVTVPSSSLGTQTYTCNVDHKPSNTKVDKRVESKYGPPCPPCPAPEFRRGPSVFLFPPKPKDTLMISRTPEVTCVVVDVSQEDPEVQFNWYVDGVEVHNAKTKPREEQYNSTYRVVSVLTVLHQDWLNGKEYKCKVSNKGLPSSIEKTISKAKGQPREPQVYTLPPSQEEMTKNQVSLTCLVKGFYPSDIAVEWESNGQPENNYKTTPPVLDSDGSFFLYSRLTVDKSRWQEGNVFSCSVMHEALHNHYTQKSLSLSP

SEQ ID NO: 631 - protein, 325 aa, Artificial Sequence
  An artificially synthesized sequence
ASTKGPSVFPLAPCSRSTSESTAALGCLVKCYFPEPVTVSWNSGALTSGVHTFPAVLQSSGLYSLSSVVTVPSSSLGTQTYTCNVDHKPSNTKVDKRVESKYGPPCPPCPAPEFRRGPSVFLFPPKPKDTLMISRTPEVTCVVVDVSQEDPEVQFNWYVDGVEVHNAKTKPREEQYNSTYRVVSVLTVLHQDWLNGKEYKCKVSNKGLPSSIEKTISKAKGQPREPQVYTLPPSQEEMTKNQVSLTCLVKGFYPSDIAVEWESNGQPENNYKTTPPVLDSDGSFFLYSRLTVDKSRWQEGNVFSCSVMHEALHNHYTQKSLSLSP

SEQ ID NO: 632 - protein, 325 aa, Artificial Sequence
  An artificially synthesized sequence
ASTKGPSVFPLAPCSRSTSESTAALGCLVKDCFPEPVTVSWNSGALTSGVHTFPAVLQSSGLYSLSSVVTVPSSSLGTQTYTCNVDHKPSNTKVDKRVESKYGPPCPPCPAPEFRRGPSVFLFPPKPKDTLMISRTPEVTCVVVDVSQEDPEVQFNWYVDGVEVHNAKTKPREEQYNSTYRVVSVLTVLHQDWLNGKEYKCKVSNKGLPSSIEKTISKAKGQPREPQVYTLPPSQEEMTKNQVSLTCLVKGFYPSDIAVEWESNGQPENNYKTTPPVLDSDGSFFLYSRLTVDKSRWQEGNVFSCSVMHEALHNHYTQKSLSLSP

SEQ ID NO: 633 - protein, 325 aa, Artificial Sequence
  An artificially synthesized sequence
ASTKGPSVFPLAPCSRSTSESTAALGCLVKDYCPEPVTVSWNSGALTSGVHTFPAVLQSSGLYSLSSVVTVPSSSLGTQTYTCNVDHKPSNTKVDKRVESKYGPPCPPCPAPEFRRGPSVFLFPPKPKDTLMISRTPEVTCVVVDVSQEDPEVQFNWYVDGVEVHNAKTKPREEQYNSTYRVVSVLTVLHQDWLNGKEYKCKVSNKGLPSSIEKTISKAKGQPREPQVYTLPPSQEEMTKNQVSLTCLVKGFYPSDIAVEWESNGQPENNYKTTPPVLDSDGSFFLYSRLTVDKSRWQEGNVFSCSVMHEALHNHYTQKSLSLSP

SEQ ID NO: 634 - protein, 325 aa, Artificial Sequence
  An artificially synthesized sequence
ASTKGPSVFPLAPCSRSTSESTAALGCLVKDYFCEPVTVSWNSGALTSGVHTFPAVLQSSGLYSLSSVVTVPSSSLGTQTYTCNVDHKPSNTKVDKRVESKYGPPCPPCPAPEFRRGPSVFLFPPKPKDTLMISRTPEVTCVVVDVSQEDPEVQFNWYVDGVEVHNAKTKPREEQYNSTYRVVSVLTVLHQDWLNGKEYKCKVSNKGLPSSIEKTISKAKGQPREPQVYTLPPSQEEMTKNQVSLTCLVKGFYPSDIAVEWESNGQPENNYKTTPPVLDSDGSFFLYSRLTVDKSRWQEGNVFSCSVMHEALHNHYTQKSLSLSP

SEQ ID NO: 635 - protein, 325 aa, Artificial Sequence
  An artificially synthesized sequence
ASTKGPSVFPLAPCSRSTSESTAALGCLVKDYFPCPVTVSWNSGALTSGVHTFPAVLQSSGLYSLSSVVTVPSSSLGTQTYTCNVDHKPSNTKVDKRVESKYGPPCPPCPAPEFRRGPSVFLFPPKPKDTLMISRTPEVTCVVVDVSQEDPEVQFNWYVDGVEVHNAKTKPREEQYNSTYRVVSVLTVLHQDWLNGKEYKCKVSNKGLPSSIEKTISKAKGQPREPQVYTLPPSQEEMTKNQVSLTCLVKGFYPSDIAVEWESNGQPENNYKTTPPVLDSDGSFFLYSRLTVDKSRWQEGNVFSCSVMHEALHNHYTQKSLSLSP

SEQ ID NO: 636 - protein, 325 aa, Artificial Sequence
  An artificially synthesized sequence
ASTKGPSVFPLAPCSRSTSESTAALGCLVKDYFPECVTVSWNSGALTSGVHTFPAVLQSSGLYSLSSVVTVPSSSLGTQTYTCNVDHKPSNTKVDKRVESKYGPPCPPCPAPEFRRGPSVFLFPPKPKDTLMISRTPEVTCVVVDVSQEDPEVQFNWYVDGVEVHNAKTKPREEQYNSTYRVVSVLTVLHQDWLNGKEYKCKVSNKGLPSSIEKTISKAKGQPREPQVYTLPPSQEEMTKNQVSLTCLVKGFYPSDIAVEWESNGQPENNYKTTPPVLDSDGSFFLYSRLTVDKSRWQEGNVFSCSVMHEALHNHYTQKSLSLSP

SEQ ID NO: 637 - protein, 325 aa, Artificial Sequence
  An artificially synthesized sequence
ASTKGPSVFPLAPCSRSTSESTAALGCLVKDYFPEPCTVSWNSGALTSGVHTFPAVLQSSGLYSLSSVVTVPSSSLGTQTYTCNVDHKPSNTKVDKRVESKYGPPCPPCPAPEFRRGPSVFLFPPKPKDTLMISRTPEVTCVVVDVSQEDPEVQFNWYVDGVEVHNAKTKPREEQYNSTYRVVSVLTVLHQDWLNGKEYKCKVSNKGLPSSIEKTISKAKGQPREPQVYTLPPSQEEMTKNQVSLTCLVKGFYPSDIAVEWESNGQPENNYKTTPPVLDSDGSFFLYSRLTVDKSRWQEGNVFSCSVMHEALHNHYTQKSLSLSP

SEQ ID NO: 638 - protein, 325 aa, Artificial Sequence
  An artificially synthesized sequence
ASTKGPSVFPLAPCSRSTSESTAALGCLVKDYFPEPVCVSWNSGALTSGVHTFPAVLQSSGLYSLSSVVTVPSSSLGTQTYTCNVDHKPSNTKVDKRVESKYGPPCPPCPAPEFRRGPSVFLFPPKPKDTLMISRTPEVTCVVVDVSQEDPEVQFNWYVDGVEVHNAKTKPREEQYNSTYRVVSVLTVLHQDWLNGKEYKCKVSNKGLPSSIEKTISKAKGQPREPQVYTLPPSQEEMTKNQVSLTCLVKGFYPSDIAVEWESNGQPENNYKTTPPVLDSDGSFFLYSRLTVDKSRWQEGNVFSCSVMHEALHNHYTQKSLSLSP

SEQ ID NO: 639 - protein, 325 aa, Artificial Sequence
  An artificially synthesized sequence
ASTKGPSVFPLAPCSRSTSESTAALGCLVKDYFPEPVTCSWNSGALTSGVHTFPAVLQSSGLYSLSSVVTVPSSSLGTQTYTCNVDHKPSNTKVDKRVESKYGPPCPPCPAPEFRRGPSVFLFPPKPKDTLMISRTPEVTCVVVDVSQEDPEVQFNWYVDGVEVHNAKTKPREEQYNSTYRVVSVLTVLHQDWLNGKEYKCKVSNKGLPSSIEKTISKAKGQPREPQVYTLPPSQEEMTKNQVSLTCLVKGFYPSDIAVEWESNGQPENNYKTTPPVLDSDGSFFLYSRLTVDKSRWQEGNVFSCSVMHEALHNHYTQKSLSLSP

SEQ ID NO: 640 - protein, 325 aa, Artificial Sequence
  An artificially synthesized sequence
ASTKGPSVFPLAPCSRSTSESTAALGCLVKDYFPEPVTVCWNSGALTSGVHTFPAVLQSSGLYSLSSVVTVPSSSLGTQTYTCNVDHKPSNTKVDKRVESKYGPPCPPCPAPEFRRGPSVFLFPPKPKDTLMISRTPEVTCVVVDVSQEDPEVQFNWYVDGVEVHNAKTKPREEQYNSTYRVVSVLTVLHQDWLNGKEYKCKVSNKGLPSSIEKTISKAKGQPREPQVYTLPPSQEEMTKNQVSLTCLVKGFYPSDIAVEWESNGQPENNYKTTPPVLDSDGSFFLYSRLTVDKSRWQEGNVFSCSVMHEALHNHYTQKSLSLSP

SEQ ID NO: 641 - protein, 325 aa, Artificial Sequence
  An artificially synthesized sequence
ASTKGPSVFPLAPCSRSTSESTAALGCLVKDYFPEPVTVSCNSGALTSGVHTFPAVLQSSGLYSLSSVVTVPSSSLGTQTYTCNVDHKPSNTKVDKRVESKYGPPCPPCPAPEFRRGPSVFLFPPKPKDTLMISRTPEVTCVVVDVSQEDPEVQFNWYVDGVEVHNAKTKPREEQYNSTYRVVSVLTVLHQDWLNGKEYKCKVSNKGLPSSIEKTISKAKGQPREPQVYTLPPSQEEMTKNQVSLTCLVKGFYPSDIAVEWESNGQPENNYKTTPPVLDSDGSFFLYSRLTVDKSRWQEGNVFSCSVMHEALHNHYTQKSLSLSP

SEQ ID NO: 642 - protein, 325 aa, Artificial Sequence
  An artificially synthesized sequence
ASTKGPSVFPLAPCSRSTSESTAALGCLVKDYFPEPVTVSWCSGALTSGVHTFPAVLQSSGLYSLSSVVTVPSSSLGTQTYTCNVDHKPSNTKVDKRVESKYGPPCPPCPAPEFRRGPSVFLFPPKPKDTLMISRTPEVTCVVVDVSQEDPEVQFNWYVDGVEVHNAKTKPREEQYNSTYRVVSVLTVLHQDWLNGKEYKCKVSNKGLPSSIEKTISKAKGQPREPQVYTLPPSQEEMTKNQVSLTCLVKGFYPSDIAVEWESNGQPENNYKTTPPVLDSDGSFFLYSRLTVDKSRWQEGNVFSCSVMHEALHNHYTQKSLSLSP

SEQ ID NO: 643 - protein, 325 aa, Artificial Sequence
  An artificially synthesized sequence
ASTKGPSVFPLAPCSRSTSESTAALGCLVKDYFPEPVTVSWNCGALTSGVHTFPAVLQSSGLYSLSSVVTVPSSSLGTQTYTCNVDHKPSNTKVDKRVESKYGPPCPPCPAPEFRRGPSVFLFPPKPKDTLMISRTPEVTCVVVDVSQEDPEVQFNWYVDGVEVHNAKTKPREEQYNSTYRVVSVLTVLHQDWLNGKEYKCKVSNKGLPSSIEKTISKAKGQPREPQVYTLPPSQEEMTKNQVSLTCLVKGFYPSDIAVEWESNGQPENNYKTTPPVLDSDGSFFLYSRLTVDKSRWQEGNVFSCSVMHEALHNHYTQKSLSLSP

SEQ ID NO: 644 - protein, 325 aa, Artificial Sequence
  An artificially synthesized sequence
ASTKGPSVFPLAPCSRSTSESTAALGCLVKDYFPEPVTVSWNSCALTSGVHTFPAVLQSSGLYSLSSVVTVPSSSLGTQTYTCNVDHKPSNTKVDKRVESKYGPPCPPCPAPEFRRGPSVFLFPPKPKDTLMISRTPEVTCVVVDVSQEDPEVQFNWYVDGVEVHNAKTKPREEQYNSTYRVVSVLTVLHQDWLNGKEYKCKVSNKGLPSSIEKTISKAKGQPREPQVYTLPPSQEEMTKNQVSLTCLVKGFYPSDIAVEWESNGQPENNYKTTPPVLDSDGSFFLYSRLTVDKSRWQEGNVFSCSVMHEALHNHYTQKSLSLSP

SEQ ID NO: 645 - protein, 325 aa, Artificial Sequence
  An artificially synthesized sequence
ASTKGPSVFPLAPCSRSTSESTAALGCLVKDYFPEPVTVSWNSGCLTSGVHTFPAVLQSSGLYSLSSVVTVPSSSLGTQTYTCNVDHKPSNTKVDKRVESKYGPPCPPCPAPEFRRGPSVFLFPPKPKDTLMISRTPEVTCVVVDVSQEDPEVQFNWYVDGVEVHNAKTKPREEQYNSTYRVVSVLTVLHQDWLNGKEYKCKVSNKGLPSSIEKTISKAKGQPREPQVYTLPPSQEEMTKNQVSLTCLVKGFYPSDIAVEWESNGQPENNYKTTPPVLDSDGSFFLYSRLTVDKSRWQEGNVFSCSVMHEALHNHYTQKSLSLSP

SEQ ID NO: 646 - protein, 325 aa, Artificial Sequence
  An artificially synthesized sequence
ASTKGPSVFPLAPCSRSTSESTAALGCLVKDYFPEPVTVSWNSGACTSGVHTFPAVLQSSGLYSLSSVVTVPSSSLGTQTYTCNVDHKPSNTKVDKRVESKYGPPCPPCPAPEFRRGPSVFLFPPKPKDTLMISRTPEVTCVVVDVSQEDPEVQFNWYVDGVEVHNAKTKPREEQYNSTYRVVSVLTVLHQDWLNGKEYKCKVSNKGLPSSIEKTISKAKGQPREPQVYTLPPSQEEMTKNQVSLTCLVKGFYPSDIAVEWESNGQPENNYKTTPPVLDSDGSFFLYSRLTVDKSRWQEGNVFSCSVMHEALHNHYTQKSLSLSP

SEQ ID NO: 647 - protein, 325 aa, Artificial Sequence
  An artificially synthesized sequence
ASTKGPSVFPLAPCSRSTSESTAALGCLVKDYFPEPVTVSWNSGALCSGVHTFPAVLQSSGLYSLSSVVTVPSSSLGTQTYTCNVDHKPSNTKVDKRVESKYGPPCPPCPAPEFRRGPSVFLFPPKPKDTLMISRTPEVTCVVVDVSQEDPEVQFNWYVDGVEVHNAKTKPREEQYNSTYRVVSVLTVLHQDWLNGKEYKCKVSNKGLPSSIEKTISKAKGQPREPQVYTLPPSQEEMTKNQVSLTCLVKGFYPSDIAVEWESNGQPENNYKTTPPVLDSDGSFFLYSRLTVDKSRWQEGNVFSCSVMHEALHNHYTQKSLSLSP

SEQ ID NO: 648 - protein, 325 aa, Artificial Sequence
  An artificially synthesized sequence
ASTKGPSVFPLAPCSRSTSESTAALGCLVKDYFPEPVTVSWNSGALTCGVHTFPAVLQSSGLYSLSSVVTVPSSSLGTQTYTCNVDHKPSNTKVDKRVESKYGPPCPPCPAPEFRRGPSVFLFPPKPKDTLMISRTPEVTCVVVDVSQEDPEVQFNWYVDGVEVHNAKTKPREEQYNSTYRVVSVLTVLHQDWLNGKEYKCKVSNKGLPSSIEKTISKAKGQPREPQVYTLPPSQEEMTKNQVSLTCLVKGFYPSDIAVEWESNGQPENNYKTTPPVLDSDGSFFLYSRLTVDKSRWQEGNVFSCSVMHEALHNHYTQKSLSLSP

SEQ ID NO: 649 - protein, 325 aa, Artificial Sequence
  An artificially synthesized sequence
ASTKGPSVFPLAPCSRSTSESTAALGCLVKDYFPEPVTVSWNSGALTSCVHTFPAVLQSSGLYSLSSVVTVPSSSLGTQTYTCNVDHKPSNTKVDKRVESKYGPPCPPCPAPEFRRGPSVFLFPPKPKDTLMISRTPEVTCVVVDVSQEDPEVQFNWYVDGVEVHNAKTKPREEQYNSTYRVVSVLTVLHQDWLNGKEYKCKVSNKGLPSSIEKTISKAKGQPREPQVYTLPPSQEEMTKNQVSLTCLVKGFYPSDIAVEWESNGQPENNYKTTPPVLDSDGSFFLYSRLTVDKSRWQEGNVFSCSVMHEALHNHYTQKSLSLSP

SEQ ID NO: 650 - protein, 325 aa, Artificial Sequence
  An artificially synthesized sequence
ASTKGPSVFPLAPCSRSTSESTAALGCLVKDYFPEPVTVSWNSGALTSGCHTFPAVLQSSGLYSLSSVVTVPSSSLGTQTYTCNVDHKPSNTKVDKRVESKYGPPCPPCPAPEFRRGPSVFLFPPKPKDTLMISRTPEVTCVVVDVSQEDPEVQFNWYVDGVEVHNAKTKPREEQYNSTYRVVSVLTVLHQDWLNGKEYKCKVSNKGLPSSIEKTISKAKGQPREPQVYTLPPSQEEMTKNQVSLTCLVKGFYPSDIAVEWESNGQPENNYKTTPPVLDSDGSFFLYSRLTVDKSRWQEGNVFSCSVMHEALHNHYTQKSLSLSP

SEQ ID NO: 651 - protein, 325 aa, Artificial Sequence
  An artificially synthesized sequence
ASTKGPSVFPLAPCSRSTSESTAALGCLVKDYFPEPVTVSWNSGALTSGVHTFPACLQSSGLYSLSSVVTVPSSSLGTQTYTCNVDHKPSNTKVDKRVESKYGPPCPPCPAPEFRRGPSVFLFPPKPKDTLMISRTPEVTCVVVDVSQEDPEVQFNWYVDGVEVHNAKTKPREEQYNSTYRVVSVLTVLHQDWLNGKEYKCKVSNKGLPSSIEKTISKAKGQPREPQVYTLPPSQEEMTKNQVSLTCLVKGFYPSDIAVEWESNGQPENNYKTTPPVLDSDGSFFLYSRLTVDKSRWQEGNVFSCSVMHEALHNHYTQKSLSLSP

SEQ ID NO: 652 - protein, 325 aa, Artificial Sequence
  An artificially synthesized sequence
ASTKGPSVFPLAPCSRSTSESTAALGCLVKDYFPEPVTVSWNSGALTSGVHTFPAVCQSSGLYSLSSVVTVPSSSLGTQTYTCNVDHKPSNTKVDKRVESKYGPPCPPCPAPEFRRGPSVFLFPPKPKDTLMISRTPEVTCVVVDVSQEDPEVQFNWYVDGVEVHNAKTKPREEQYNSTYRVVSVLTVLHQDWLNGKEYKCKVSNKGLPSSIEKTISKAKGQPREPQVYTLPPSQEEMTKNQVSLTCLVKGFYPSDIAVEWESNGQPENNYKTTPPVLDSDGSFFLYSRLTVDKSRWQEGNVFSCSVMHEALHNHYTQKSLSLSP

SEQ ID NO: 653 - protein, 325 aa, Artificial Sequence
  An artificially synthesized sequence
ASTKGPSVFPLAPCSRSTSESTAALGCLVKDYFPEPVTVSWNSGALTSGVHTFPAVLCSSGLYSLSSVVTVPSSSLGTQTYTCNVDHKPSNTKVDKRVESKYGPPCPPCPAPEFRRGPSVFLFPPKPKDTLMISRTPEVTCVVVDVSQEDPEVQFNWYVDGVEVHNAKTKPREEQYNSTYRVVSVLTVLHQDWLNGKEYKCKVSNKGLPSSIEKTISKAKGQPREPQVYTLPPSQEEMTKNQVSLTCLVKGFYPSDIAVEWESNGQPENNYKTTPPVLDSDGSFFLYSRLTVDKSRWQEGNVFSCSVMHEALHNHYTQKSLSLSP

SEQ ID NO: 654 - protein, 325 aa, Artificial Sequence
  An artificially synthesized sequence
ASTKGPSVFPLAPCSRSTSESTAALGCLVKDYFPEPVTVSWNSGALTSGVHTFPAVLQCSGLYSLSSVVTVPSSSLGTQTYTCNVDHKPSNTKVDKRVESKYGPPCPPCPAPEFRRGPSVFLFPPKPKDTLMISRTPEVTCVVVDVSQEDPEVQFNWYVDGVEVHNAKTKPREEQYNSTYRVVSVLTVLHQDWLNGKEYKCKVSNKGLPSSIEKTISKAKGQPREPQVYTLPPSQEEMTKNQVSLTCLVKGFYPSDIAVEWESNGQPENNYKTTPPVLDSDGSFFLYSRLTVDKSRWQEGNVFSCSVMHEALHNHYTQKSLSLSP

SEQ ID NO: 655 - protein, 325 aa, Artificial Sequence
  An artificially synthesized sequence
ASTKGPSVFPLAPCSRSTSESTAALGCLVKDYFPEPVTVSWNSGALTSGVHTFPAVLQSCGLYSLSSVVTVPSSSLGTQTYTCNVDHKPSNTKVDKRVESKYGPPCPPCPAPEFRRGPSVFLFPPKPKDTLMISRTPEVTCVVVDVSQEDPEVQFNWYVDGVEVHNAKTKPREEQYNSTYRVVSVLTVLHQDWLNGKEYKCKVSNKGLPSSIEKTISKAKGQPREPQVYTLPPSQEEMTKNQVSLTCLVKGFYPSDIAVEWESNGQPENNYKTTPPVLDSDGSFFLYSRLTVDKSRWQEGNVFSCSVMHEALHNHYTQKSLSLSP

SEQ ID NO: 656 - protein, 325 aa, Artificial Sequence
  An artificially synthesized sequence
ASTKGPSVFPLAPCSRSTSESTAALGCLVKDYFPEPVTVSWNSGALTSGVHTFPAVLQSSCLYSLSSVVTVPSSSLGTQTYTCNVDHKPSNTKVDKRVESKYGPPCPPCPAPEFRRGPSVFLFPPKPKDTLMISRTPEVTCVVVDVSQEDPEVQFNWYVDGVEVHNAKTKPREEQYNSTYRVVSVLTVLHQDWLNGKEYKCKVSNKGLPSSIEKTISKAKGQPREPQVYTLPPSQEEMTKNQVSLTCLVKGFYPSDIAVEWESNGQPENNYKTTPPVLDSDGSFFLYSRLTVDKSRWQEGNVFSCSVMHEALHNHYTQKSLSLSP

SEQ ID NO: 657 - protein, 325 aa, Artificial Sequence
  An artificially synthesized sequence
ASTKGPSVFPLAPCSRSTSESTAALGCLVKDYFPEPVTVSWNSGALTSGVHTFPAVLQSSGCYSLSSVVTVPSSSLGTQTYTCNVDHKPSNTKVDKRVESKYGPPCPPCPAPEFRRGPSVFLFPPKPKDTLMISRTPEVTCVVVDVSQEDPEVQFNWYVDGVEVHNAKTKPREEQYNSTYRVVSVLTVLHQDWLNGKEYKCKVSNKGLPSSIEKTISKAKGQPREPQVYTLPPSQEEMTKNQVSLTCLVKGFYPSDIAVEWESNGQPENNYKTTPPVLDSDGSFFLYSRLTVDKSRWQEGNVFSCSVMHEALHNHYTQKSLSLSP

SEQ ID NO: 658 - protein, 325 aa, Artificial Sequence
  An artificially synthesized sequence
ASTKGPSVFPLAPCSRSTSESTAALGCLVKDYFPEPVTVSWNSGALTSGVHTFPAVLQSSGLCSLSSVVTVPSSSLGTQTYTCNVDHKPSNTKVDKRVESKYGPPCPPCPAPEFRRGPSVFLFPPKPKDTLMISRTPEVTCVVVDVSQEDPEVQFNWYVDGVEVHNAKTKPREEQYNSTYRVVSVLTVLHQDWLNGKEYKCKVSNKGLPSSIEKTISKAKGQPREPQVYTLPPSQEEMTKNQVSLTCLVKGFYPSDIAVEWESNGQPENNYKTTPPVLDSDGSFFLYSRLTVDKSRWQEGNVFSCSVMHEALHNHYTQKSLSLSP

SEQ ID NO: 659 - protein, 325 aa, Artificial Sequence
  An artificially synthesized sequence
ASTKGPSVFPLAPCSRSTSESTAALGCLVKDYFPEPVTVSWNSGALTSGVHTFPAVLQSSGLYSLSSVCTVPSSSLGTQTYTCNVDHKPSNTKVDKRVESKYGPPCPPCPAPEFRRGPSVFLFPPKPKDTLMISRTPEVTCVVVDVSQEDPEVQFNWYVDGVEVHNAKTKPREEQYNSTYRVVSVLTVLHQDWLNGKEYKCKVSNKGLPSSIEKTISKAKGQPREPQVYTLPPSQEEMTKNQVSLTCLVKGFYPSDIAVEWESNGQPENNYKTTPPVLDSDGSFFLYSRLTVDKSRWQEGNVFSCSVMHEALHNHYTQKSLSLSP

SEQ ID NO: 660 - protein, 325 aa, Artificial Sequence
  An artificially synthesized sequence
ASTKGPSVFPLAPCSRSTSESTAALGCLVKDYFPEPVTVSWNSGALTSGVHTFPAVLQSSGLYSLSSVVCVPSSSLGTQTYTCNVDHKPSNTKVDKRVESKYGPPCPPCPAPEFRRGPSVFLFPPKPKDTLMISRTPEVTCVVVDVSQEDPEVQFNWYVDGVEVHNAKTKPREEQYNSTYRVVSVLTVLHQDWLNGKEYKCKVSNKGLPSSIEKTISKAKGQPREPQVYTLPPSQEEMTKNQVSLTCLVKGFYPSDIAVEWESNGQPENNYKTTPPVLDSDGSFFLYSRLTVDKSRWQEGNVFSCSVMHEALHNHYTQKSLSLSP

SEQ ID NO: 661 - protein, 325 aa, Artificial Sequence
  An artificially synthesized sequence
ASTKGPSVFPLAPCSRSTSESTAALGCLVKDYFPEPVTVSWNSGALTSGVHTFPAVLQSSGLYSLSSVVTCPSSSLGTQTYTCNVDHKPSNTKVDKRVESKYGPPCPPCPAPEFRRGPSVFLFPPKPKDTLMISRTPEVTCVVVDVSQEDPEVQFNWYVDGVEVHNAKTKPREEQYNSTYRVVSVLTVLHQDWLNGKEYKCKVSNKGLPSSIEKTISKAKGQPREPQVYTLPPSQEEMTKNQVSLTCLVKGFYPSDIAVEWESNGQPENNYKTTPPVLDSDGSFFLYSRLTVDKSRWQEGNVFSCSVMHEALHNHYTQKSLSLSP

SEQ ID NO: 662 - protein, 325 aa, Artificial Sequence
  An artificially synthesized sequence
ASTKGPSVFPLAPCSRSTSESTAALGCLVKDYFPEPVTVSWNSGALTSGVHTFPAVLQSSGLYSLSSVVTVCSSSLGTQTYTCNVDHKPSNTKVDKRVESKYGPPCPPCPAPEFRRGPSVFLFPPKPKDTLMISRTPEVTCVVVDVSQEDPEVQFNWYVDGVEVHNAKTKPREEQYNSTYRVVSVLTVLHQDWLNGKEYKCKVSNKGLPSSIEKTISKAKGQPREPQVYTLPPSQEEMTKNQVSLTCLVKGFYPSDIAVEWESNGQPENNYKTTPPVLDSDGSFFLYSRLTVDKSRWQEGNVFSCSVMHEALHNHYTQKSLSLSP

SEQ ID NO: 663 - protein, 325 aa, Artificial Sequence
  An artificially synthesized sequence
ASTKGPSVFPLAPCSRSTSESTAALGCLVKDYFPEPVTVSWNSGALTSGVHTFPAVLQSSGLYSLSSVVTVPCSSLGTQTYTCNVDHKPSNTKVDKRVESKYGPPCPPCPAPEFRRGPSVFLFPPKPKDTLMISRTPEVTCVVVDVSQEDPEVQFNWYVDGVEVHNAKTKPREEQYNSTYRVVSVLTVLHQDWLNGKEYKCKVSNKGLPSSIEKTISKAKGQPREPQVYTLPPSQEEMTKNQVSLTCLVKGFYPSDIAVEWESNGQPENNYKTTPPVLDSDGSFFLYSRLTVDKSRWQEGNVFSCSVMHEALHNHYTQKSLSLSP

SEQ ID NO: 664 - protein, 325 aa, Artificial Sequence
  An artificially synthesized sequence
ASTKGPSVFPLAPCSRSTSESTAALGCLVKDYFPEPVTVSWNSGALTSGVHTFPAVLQSSGLYSLSSVVTVPSCSLGTQTYTCNVDHKPSNTKVDKRVESKYGPPCPPCPAPEFRRGPSVFLFPPKPKDTLMISRTPEVTCVVVDVSQEDPEVQFNWYVDGVEVHNAKTKPREEQYNSTYRVVSVLTVLHQDWLNGKEYKCKVSNKGLPSSIEKTISKAKGQPREPQVYTLPPSQEEMTKNQVSLTCLVKGFYPSDIAVEWESNGQPENNYKTTPPVLDSDGSFFLYSRLTVDKSRWQEGNVFSCSVMHEALHNHYTQKSLSLSP

SEQ ID NO: 665 - protein, 325 aa, Artificial Sequence
  An artificially synthesized sequence
ASTKGPSVFPLAPCSRSTSESTAALGCLVKDYFPEPVTVSWNSGALTSGVHTFPAVLQSSGLYSLSSVVTVPSSCLGTQTYTCNVDHKPSNTKVDKRVESKYGPPCPPCPAPEFRRGPSVFLFPPKPKDTLMISRTPEVTCVVVDVSQEDPEVQFNWYVDGVEVHNAKTKPREEQYNSTYRVVSVLTVLHQDWLNGKEYKCKVSNKGLPSSIEKTISKAKGQPREPQVYTLPPSQEEMTKNQVSLTCLVKGFYPSDIAVEWESNGQPENNYKTTPPVLDSDGSFFLYSRLTVDKSRWQEGNVFSCSVMHEALHNHYTQKSLSLSP

SEQ ID NO: 666 - protein, 325 aa, Artificial Sequence
  An artificially synthesized sequence
ASTKGPSVFPLAPCSRSTSESTAALGCLVKDYFPEPVTVSWNSGALTSGVHTFPAVLQSSGLYSLSSVVTVPSSSCGTQTYTCNVDHKPSNTKVDKRVESKYGPPCPPCPAPEFRRGPSVFLFPPKPKDTLMISRTPEVTCVVVDVSQEDPEVQFNWYVDGVEVHNAKTKPREEQYNSTYRVVSVLTVLHQDWLNGKEYKCKVSNKGLPSSIEKTISKAKGQPREPQVYTLPPSQEEMTKNQVSLTCLVKGFYPSDIAVEWESNGQPENNYKTTPPVLDSDGSFFLYSRLTVDKSRWQEGNVFSCSVMHEALHNHYTQKSLSLSP

SEQ ID NO: 667 - protein, 325 aa, Artificial Sequence
  An artificially synthesized sequence
ASTKGPSVFPLAPCSRSTSESTAALGCLVKDYFPEPVTVSWNSGALTSGVHTFPAVLQSSGLYSLSSVVTVPSSSLCTQTYTCNVDHKPSNTKVDKRVESKYGPPCPPCPAPEFRRGPSVFLFPPKPKDTLMISRTPEVTCVVVDVSQEDPEVQFNWYVDGVEVHNAKTKPREEQYNSTYRVVSVLTVLHQDWLNGKEYKCKVSNKGLPSSIEKTISKAKGQPREPQVYTLPPSQEEMTKNQVSLTCLVKGFYPSDIAVEWESNGQPENNYKTTPPVLDSDGSFFLYSRLTVDKSRWQEGNVFSCSVMHEALHNHYTQKSLSLSP

SEQ ID NO: 668 - protein, 325 aa, Artificial Sequence
  An artificially synthesized sequence
ASTKGPSVFPLAPCSRSTSESTAALGCLVKDYFPEPVTVSWNSGALTSGVHTFPAVLQSSGLYSLSSVVTVPSSSLGCQTYTCNVDHKPSNTKVDKRVESKYGPPCPPCPAPEFRRGPSVFLFPPKPKDTLMISRTPEVTCVVVDVSQEDPEVQFNWYVDGVEVHNAKTKPREEQYNSTYRVVSVLTVLHQDWLNGKEYKCKVSNKGLPSSIEKTISKAKGQPREPQVYTLPPSQEEMTKNQVSLTCLVKGFYPSDIAVEWESNGQPENNYKTTPPVLDSDGSFFLYSRLTVDKSRWQEGNVFSCSVMHEALHNHYTQKSLSLSP

SEQ ID NO: 669 - protein, 325 aa, Artificial Sequence
  An artificially synthesized sequence
ASTKGPSVFPLAPCSRSTSESTAALGCLVKDYFPEPVTVSWNSGALTSGVHTFPAVLQSSGLYSLSSVVTVPSSSLGTCTYTCNVDHKPSNTKVDKRVESKYGPPCPPCPAPEFRRGPSVFLFPPKPKDTLMISRTPEVTCVVVDVSQEDPEVQFNWYVDGVEVHNAKTKPREEQYNSTYRVVSVLTVLHQDWLNGKEYKCKVSNKGLPSSIEKTISKAKGQPREPQVYTLPPSQEEMTKNQVSLTCLVKGFYPSDIAVEWESNGQPENNYKTTPPVLDSDGSFFLYSRLTVDKSRWQEGNVFSCSVMHEALHNHYTQKSLSLSP

SEQ ID NO: 670 - protein, 325 aa, Artificial Sequence
  An artificially synthesized sequence
ASTKGPSVFPLAPCSRSTSESTAALGCLVKDYFPEPVTVSWNSGALTSGVHTFPAVLQSSGLYSLSSVVTVPSSSLGTQCYTCNVDHKPSNTKVDKRVESKYGPPCPPCPAPEFRRGPSVFLFPPKPKDTLMISRTPEVTCVVVDVSQEDPEVQFNWYVDGVEVHNAKTKPREEQYNSTYRVVSVLTVLHQDWLNGKEYKCKVSNKGLPSSIEKTISKAKGQPREPQVYTLPPSQEEMTKNQVSLTCLVKGFYPSDIAVEWESNGQPENNYKTTPPVLDSDGSFFLYSRLTVDKSRWQEGNVFSCSVMHEALHNHYTQKSLSLSP

SEQ ID NO: 671 - protein, 325 aa, Artificial Sequence
  An artificially synthesized sequence
ASTKGPSVFPLAPCSRSTSESTAALGCLVKDYFPEPVTVSWNSGALTSGVHTFPAVLQSSGLYSLSSVVTVPSSSLGTQTCTCNVDHKPSNTKVDKRVESKYGPPCPPCPAPEFRRGPSVFLFPPKPKDTLMISRTPEVTCVVVDVSQEDPEVQFNWYVDGVEVHNAKTKPREEQYNSTYRVVSVLTVLHQDWLNGKEYKCKVSNKGLPSSIEKTISKAKGQPREPQVYTLPPSQEEMTKNQVSLTCLVKGFYPSDIAVEWESNGQPENNYKTTPPVLDSDGSFFLYSRLTVDKSRWQEGNVFSCSVMHEALHNHYTQKSLSLSP

SEQ ID NO: 672 - protein, 325 aa, Artificial Sequence
  An artificially synthesized sequence
ASTKGPSVFPLAPCSRSTSESTAALGCLVKDYFPEPVTVSWNSGALTSGVHTFPAVLQSSGLYSLSSVVTVPSSSLGTQTYCCNVDHKPSNTKVDKRVESKYGPPCPPCPAPEFRRGPSVFLFPPKPKDTLMISRTPEVTCVVVDVSQEDPEVQFNWYVDGVEVHNAKTKPREEQYNSTYRVVSVLTVLHQDWLNGKEYKCKVSNKGLPSSIEKTISKAKGQPREPQVYTLPPSQEEMTKNQVSLTCLVKGFYPSDIAVEWESNGQPENNYKTTPPVLDSDGSFFLYSRLTVDKSRWQEGNVFSCSVMHEALHNHYTQKSLSLSP

SEQ ID NO: 673 - protein, 325 aa, Artificial Sequence
  An artificially synthesized sequence
ASTKGPSVFPLAPCSRSTSESTAALGCLVKDYFPEPVTVSWNSGALTSGVHTFPAVLQSSGLYSLSSVVTVPSSSLGTQTYTCCVDHKPSNTKVDKRVESKYGPPCPPCPAPEFRRGPSVFLFPPKPKDTLMISRTPEVTCVVVDVSQEDPEVQFNWYVDGVEVHNAKTKPREEQYNSTYRVVSVLTVLHQDWLNGKEYKCKVSNKGLPSSIEKTISKAKGQPREPQVYTLPPSQEEMTKNQVSLTCLVKGFYPSDIAVEWESNGQPENNYKTTPPVLDSDGSFFLYSRLTVDKSRWQEGNVFSCSVMHEALHNHYTQKSLSLSP

SEQ ID NO: 674 - protein, 325 aa, Artificial Sequence
  An artificially synthesized sequence
ASTKGPSVFPLAPCSRSTSESTAALGCLVKDYFPEPVTVSWNSGALTSGVHTFPAVLQSSGLYSLSSVVTVPSSSLGTQTYTCNCDHKPSNTKVDKRVESKYGPPCPPCPAPEFRRGPSVFLFPPKPKDTLMISRTPEVTCVVVDVSQEDPEVQFNWYVDGVEVHNAKTKPREEQYNSTYRVVSVLTVLHQDWLNGKEYKCKVSNKGLPSSIEKTISKAKGQPREPQVYTLPPSQEEMTKNQVSLTCLVKGFYPSDIAVEWESNGQPENNYKTTPPVLDSDGSFFLYSRLTVDKSRWQEGNVFSCSVMHEALHNHYTQKSLSLSP

SEQ ID NO: 675 - protein, 325 aa, Artificial Sequence
  An artificially synthesized sequence
ASTKGPSVFPLAPCSRSTSESTAALGCLVKDYFPEPVTVSWNSGALTSGVHTFPAVLQSSGLYSLSSVVTVPSSSLGTQTYTCNVCHKPSNTKVDKRVESKYGPPCPPCPAPEFRRGPSVFLFPPKPKDTLMISRTPEVTCVVVDVSQEDPEVQFNWYVDGVEVHNAKTKPREEQYNSTYRVVSVLTVLHQDWLNGKEYKCKVSNKGLPSSIEKTISKAKGQPREPQVYTLPPSQEEMTKNQVSLTCLVKGFYPSDIAVEWESNGQPENNYKTTPPVLDSDGSFFLYSRLTVDKSRWQEGNVFSCSVMHEALHNHYTQKSLSLSP

SEQ ID NO: 676 - protein, 325 aa, Artificial Sequence
  An artificially synthesized sequence
ASTKGPSVFPLAPCSRSTSESTAALGCLVKDYFPEPVTVSWNSGALTSGVHTFPAVLQSSGLYSLSSVVTVPSSSLGTQTYTCNVDCKPSNTKVDKRVESKYGPPCPPCPAPEFRRGPSVFLFPPKPKDTLMISRTPEVTCVVVDVSQEDPEVQFNWYVDGVEVHNAKTKPREEQYNSTYRVVSVLTVLHQDWLNGKEYKCKVSNKGLPSSIEKTISKAKGQPREPQVYTLPPSQEEMTKNQVSLTCLVKGFYPSDIAVEWESNGQPENNYKTTPPVLDSDGSFFLYSRLTVDKSRWQEGNVFSCSVMHEALHNHYTQKSLSLSP

SEQ ID NO: 677 - protein, 325 aa, Artificial Sequence
  An artificially synthesized sequence
ASTKGPSVFPLAPCSRSTSESTAALGCLVKDYFPEPVTVSWNSGALTSGVHTFPAVLQSSGLYSLSSVVTVPSSSLGTQTYTCNVDHCPSNTKVDKRVESKYGPPCPPCPAPEFRRGPSVFLFPPKPKDTLMISRTPEVTCVVVDVSQEDPEVQFNWYVDGVEVHNAKTKPREEQYNSTYRVVSVLTVLHQDWLNGKEYKCKVSNKGLPSSIEKTISKAKGQPREPQVYTLPPSQEEMTKNQVSLTCLVKGFYPSDIAVEWESNGQPENNYKTTPPVLDSDGSFFLYSRLTVDKSRWQEGNVFSCSVMHEALHNHYTQKSLSLSP

SEQ ID NO: 678 - protein, 325 aa, Artificial Sequence
  An artificially synthesized sequence
ASTKGPSVFPLAPCSRSTSESTAALGCLVKDYFPEPVTVSWNSGALTSGVHTFPAVLQSSGLYSLSSVVTVPSSSLGTQTYTCNVDHKCSNTKVDKRVESKYGPPCPPCPAPEFRRGPSVFLFPPKPKDTLMISRTPEVTCVVVDVSQEDPEVQFNWYVDGVEVHNAKTKPREEQYNSTYRVVSVLTVLHQDWLNGKEYKCKVSNKGLPSSIEKTISKAKGQPREPQVYTLPPSQEEMTKNQVSLTCLVKGFYPSDIAVEWESNGQPENNYKTTPPVLDSDGSFFLYSRLTVDKSRWQEGNVFSCSVMHEALHNHYTQKSLSLSP

SEQ ID NO: 679 - protein, 325 aa, Artificial Sequence
  An artificially synthesized sequence
ASTKGPSVFPLAPCSRSTSESTAALGCLVKDYFPEPVTVSWNSGALTSGVHTFPAVLQSSGLYSLSSVVTVPSSSLGTQTYTCNVDHKPCNTKVDKRVESKYGPPCPPCPAPEFRRGPSVFLFPPKPKDTLMISRTPEVTCVVVDVSQEDPEVQFNWYVDGVEVHNAKTKPREEQYNSTYRVVSVLTVLHQDWLNGKEYKCKVSNKGLPSSIEKTISKAKGQPREPQVYTLPPSQEEMTKNQVSLTCLVKGFYPSDIAVEWESNGQPENNYKTTPPVLDSDGSFFLYSRLTVDKSRWQEGNVFSCSVMHEALHNHYTQKSLSLSP

SEQ ID NO: 680 - protein, 325 aa, Artificial Sequence
  An artificially synthesized sequence
ASTKGPSVFPLAPCSRSTSESTAALGCLVKDYFPEPVTVSWNSGALTSGVHTFPAVLQSSGLYSLSSVVTVPSSSLGTQTYTCNVDHKPSCTKVDKRVESKYGPPCPPCPAPEFRRGPSVFLFPPKPKDTLMISRTPEVTCVVVDVSQEDPEVQFNWYVDGVEVHNAKTKPREEQYNSTYRVVSVLTVLHQDWLNGKEYKCKVSNKGLPSSIEKTISKAKGQPREPQVYTLPPSQEEMTKNQVSLTCLVKGFYPSDIAVEWESNGQPENNYKTTPPVLDSDGSFFLYSRLTVDKSRWQEGNVFSCSVMHEALHNHYTQKSLSLSP

SEQ ID NO: 681 - protein, 325 aa, Artificial Sequence
  An artificially synthesized sequence
ASTKGPSVFPLAPCSRSTSESTAALGCLVKDYFPEPVTVSWNSGALTSGVHTFPAVLQSSGLYSLSSVVTVPSSSLGTQTYTCNVDHKPSNCKVDKRVESKYGPPCPPCPAPEFRRGPSVFLFPPKPKDTLMISRTPEVTCVVVDVSQEDPEVQFNWYVDGVEVHNAKTKPREEQYNSTYRVVSVLTVLHQDWLNGKEYKCKVSNKGLPSSIEKTISKAKGQPREPQVYTLPPSQEEMTKNQVSLTCLVKGFYPSDIAVEWESNGQPENNYKTTPPVLDSDGSFFLYSRLTVDKSRWQEGNVFSCSVMHEALHNHYTQKSLSLSP

SEQ ID NO: 682 - protein, 325 aa, Artificial Sequence
  An artificially synthesized sequence
ASTKGPSVFPLAPCSRSTSESTAALGCLVKDYFPEPVTVSWNSGALTSGVHTFPAVLQSSGLYSLSSVVTVPSSSLGTQTYTCNVDHKPSNTCVDKRVESKYGPPCPPCPAPEFRRGPSVFLFPPKPKDTLMISRTPEVTCVVVDVSQEDPEVQFNWYVDGVEVHNAKTKPREEQYNSTYRVVSVLTVLHQDWLNGKEYKCKVSNKGLPSSIEKTISKAKGQPREPQVYTLPPSQEEMTKNQVSLTCLVKGFYPSDIAVEWESNGQPENNYKTTPPVLDSDGSFFLYSRLTVDKSRWQEGNVFSCSVMHEALHNHYTQKSLSLSP

SEQ ID NO: 683 - protein, 325 aa, Artificial Sequence
  An artificially synthesized sequence
ASTKGPSVFPLAPCSRSTSESTAALGCLVKDYFPEPVTVSWNSGALTSGVHTFPAVLQSSGLYSLSSVVTVPSSSLGTQTYTCNVDHKPSNTKCDKRVESKYGPPCPPCPAPEFRRGPSVFLFPPKPKDTLMISRTPEVTCVVVDVSQEDPEVQFNWYVDGVEVHNAKTKPREEQYNSTYRVVSVLTVLHQDWLNGKEYKCKVSNKGLPSSIEKTISKAKGQPREPQVYTLPPSQEEMTKNQVSLTCLVKGFYPSDIAVEWESNGQPENNYKTTPPVLDSDGSFFLYSRLTVDKSRWQEGNVFSCSVMHEALHNHYTQKSLSLSP

SEQ ID NO: 684 - protein, 325 aa, Artificial Sequence
  An artificially synthesized sequence
ASTKGPSVFPLAPCSRSTSESTAALGCLVKDYFPEPVTVSWNSGALTSGVHTFPAVLQSSGLYSLSSVVTVPSSSLGTQTYTCNVDHKPSNTKVCKRVESKYGPPCPPCPAPEFRRGPSVFLFPPKPKDTLMISRTPEVTCVVVDVSQEDPEVQFNWYVDGVEVHNAKTKPREEQYNSTYRVVSVLTVLHQDWLNGKEYKCKVSNKGLPSSIEKTISKAKGQPREPQVYTLPPSQEEMTKNQVSLTCLVKGFYPSDIAVEWESNGQPENNYKTTPPVLDSDGSFFLYSRLTVDKSRWQEGNVFSCSVMHEALHNHYTQKSLSLSP

SEQ ID NO: 685 - protein, 325 aa, Artificial Sequence
  An artificially synthesized sequence
ASTKGPSVFPLAPCSRSTSESTAALGCLVKDYFPEPVTVSWNSGALTSGVHTFPAVLQSSGLYSLSSVVTVPSSSLGTQTYTCNVDHKPSNTKVDCRVESKYGPPCPPCPAPEFRRGPSVFLFPPKPKDTLMISRTPEVTCVVVDVSQEDPEVQFNWYVDGVEVHNAKTKPREEQYNSTYRVVSVLTVLHQDWLNGKEYKCKVSNKGLPSSIEKTISKAKGQPREPQVYTLPPSQEEMTKNQVSLTCLVKGFYPSDIAVEWESNGQPENNYKTTPPVLDSDGSFFLYSRLTVDKSRWQEGNVFSCSVMHEALHNHYTQKSLSLSP

SEQ ID NO: 686 - protein, 325 aa, Artificial Sequence
  An artificially synthesized sequence
ASTKGPSVFPLAPCSRSTSESTAALGCLVKDYFPEPVTVSWNSGALTSGVHTFPAVLQSSGLYSLSSVVTVPSSSLGTQTYTCNVDHKPSNTKVDKCVESKYGPPCPPCPAPEFRRGPSVFLFPPKPKDTLMISRTPEVTCVVVDVSQEDPEVQFNWYVDGVEVHNAKTKPREEQYNSTYRVVSVLTVLHQDWLNGKEYKCKVSNKGLPSSIEKTISKAKGQPREPQVYTLPPSQEEMTKNQVSLTCLVKGFYPSDIAVEWESNGQPENNYKTTPPVLDSDGSFFLYSRLTVDKSRWQEGNVFSCSVMHEALHNHYTQKSLSLSP

SEQ ID NO: 687 - protein, 325 aa, Artificial Sequence
  An artificially synthesized sequence
ASTKGPSVFPLAPCSRSTSESTAALGCLVKDYFPEPVTVSWNSGALTSGVHTFPAVLQSSGLYSLSSVVTVPSSSLGTQTYTCNVDHKPSNTKVDKRCESKYGPPCPPCPAPEFRRGPSVFLFPPKPKDTLMISRTPEVTCVVVDVSQEDPEVQFNWYVDGVEVHNAKTKPREEQYNSTYRVVSVLTVLHQDWLNGKEYKCKVSNKGLPSSIEKTISKAKGQPREPQVYTLPPSQEEMTKNQVSLTCLVKGFYPSDIAVEWESNGQPENNYKTTPPVLDSDGSFFLYSRLTVDKSRWQEGNVFSCSVMHEALHNHYTQKSLSLSP

SEQ ID NO: 688 - protein, 325 aa, Artificial Sequence
  An artificially synthesized sequence
ASTKGPSVFPLAPCSRSTSESTAALGCLVKDYFPEPVTVSWNSGALTSGVHTFPAVLQSSGLYSLSSVVTVPSSSLGTQTYTCNVDHKPSNTKVDKRVCSKYGPPCPPCPAPEFRRGPSVFLFPPKPKDTLMISRTPEVTCVVVDVSQEDPEVQFNWYVDGVEVHNAKTKPREEQYNSTYRVVSVLTVLHQDWLNGKEYKCKVSNKGLPSSIEKTISKAKGQPREPQVYTLPPSQEEMTKNQVSLTCLVKGFYPSDIAVEWESNGQPENNYKTTPPVLDSDGSFFLYSRLTVDKSRWQEGNVFSCSVMHEALHNHYTQKSLSLSP

SEQ ID NO: 689 - protein, 325 aa, Artificial Sequence
  An artificially synthesized sequence
ASTKGPSVFPLAPCSRSTSESTAALGCLVKDYFPEPVTVSWNSGALTSGVHTFPAVLQSSGLYSLSSVVTVPSSSLGTQTYTCNVDHKPSNTKVDKRVECKYGPPCPPCPAPEFRRGPSVFLFPPKPKDTLMISRTPEVTCVVVDVSQEDPEVQFNWYVDGVEVHNAKTKPREEQYNSTYRVVSVLTVLHQDWLNGKEYKCKVSNKGLPSSIEKTISKAKGQPREPQVYTLPPSQEEMTKNQVSLTCLVKGFYPSDIAVEWESNGQPENNYKTTPPVLDSDGSFFLYSRLTVDKSRWQEGNVFSCSVMHEALHNHYTQKSLSLSP

SEQ ID NO: 690 - protein, 325 aa, Artificial Sequence
  An artificially synthesized sequence
ASTKGPSVFPLAPCSRSTSESTAALGCLVKDYFPEPVTVSWNSGALTSGVHTFPAVLQSSGLYSLSSVVTVPSSSLGTQTYTCNVDHKPSNTKVDKRVESCYGPPCPPCPAPEFRRGPSVFLFPPKPKDTLMISRTPEVTCVVVDVSQEDPEVQFNWYVDGVEVHNAKTKPREEQYNSTYRVVSVLTVLHQDWLNGKEYKCKVSNKGLPSSIEKTISKAKGQPREPQVYTLPPSQEEMTKNQVSLTCLVKGFYPSDIAVEWESNGQPENNYKTTPPVLDSDGSFFLYSRLTVDKSRWQEGNVFSCSVMHEALHNHYTQKSLSLSP

SEQ ID NO: 691 - protein, 324 aa, Artificial Sequence
  An artificially synthesized sequence
CSTKGPSVFPLAPCSRSTSESTAALGCLVKDYFPEPVTVSWNSGALTSGVHTFPAVLQSSGLYSLSSVVTVPSSNFGTQTYTCNVDHKPSNTKVDKTVERKCCVECPPCPAPPVAGPSVFLFPPKPKDTLMISRTPEVTCVVVDVSHEDPEVQFNWYVDGVEVHNAKTKPREEQFNSTFRVVSVLTVVHQDWLNGKEYKCKVSNKGLPAPIEKTISKTKGQPREPQVYTLPPSREEMTKNQVSLTCLVKGFYPSDIAVEWESNGQPENNYKTTPPMLDSDGSFFLYSKLTVDKSRWQQGNVFSCSVMHEALHNHYTQKSLSLSP

SEQ ID NO: 692 - protein, 324 aa, Artificial Sequence
  An artificially synthesized sequence
ACTKGPSVFPLAPCSRSTSESTAALGCLVKDYFPEPVTVSWNSGALTSGVHTFPAVLQSSGLYSLSSVVTVPSSNFGTQTYTCNVDHKPSNTKVDKTVERKCCVECPPCPAPPVAGPSVFLFPPKPKDTLMISRTPEVTCVVVDVSHEDPEVQFNWYVDGVEVHNAKTKPREEQFNSTFRVVSVLTVVHQDWLNGKEYKCKVSNKGLPAPIEKTISKTKGQPREPQVYTLPPSREEMTKNQVSLTCLVKGFYPSDIAVEWESNGQPENNYKTTPPMLDSDGSFFLYSKLTVDKSRWQQGNVFSCSVMHEALHNHYTQKSLSLSP

SEQ ID NO: 693 - protein, 324 aa, Artificial Sequence
  An artificially synthesized sequence
ASCKGPSVFPLAPCSRSTSESTAALGCLVKDYFPEPVTVSWNSGALTSGVHTFPAVLQSSGLYSLSSVVTVPSSNFGTQTYTCNVDHKPSNTKVDKTVERKCCVECPPCPAPPVAGPSVFLFPPKPKDTLMISRTPEVTCVVVDVSHEDPEVQFNWYVDGVEVHNAKTKPREEQFNSTFRVVSVLTVVHQDWLNGKEYKCKVSNKGLPAPIEKTISKTKGQPREPQVYTLPPSREEMTKNQVSLTCLVKGFYPSDIAVEWESNGQPENNYKTTPPMLDSDGSFFLYSKLTVDKSRWQQGNVFSCSVMHEALHNHYTQKSLSLSP

SEQ ID NO: 694 - protein, 324 aa, Artificial Sequence
  An artificially synthesized sequence
ASTCGPSVFPLAPCSRSTSESTAALGCLVKDYFPEPVTVSWNSGALTSGVHTFPAVLQSSGLYSLSSVVTVPSSNFGTQTYTCNVDHKPSNTKVDKTVERKCCVECPPCPAPPVAGPSVFLFPPKPKDTLMISRTPEVTCVVVDVSHEDPEVQFNWYVDGVEVHNAKTKPREEQFNSTFRVVSVLTVVHQDWLNGKEYKCKVSNKGLPAPIEKTISKTKGQPREPQVYTLPPSREEMTKNQVSLTCLVKGFYPSDIAVEWESNGQPENNYKTTPPMLDSDGSFFLYSKLTVDKSRWQQGNVFSCSVMHEALHNHYTQKSLSLSP

SEQ ID NO: 695 - protein, 324 aa, Artificial Sequence
  An artificially synthesized sequence
ASTKCPSVFPLAPCSRSTSESTAALGCLVKDYFPEPVTVSWNSGALTSGVHTFPAVLQSSGLYSLSSVVTVPSSNFGTQTYTCNVDHKPSNTKVDKTVERKCCVECPPCPAPPVAGPSVFLFPPKPKDTLMISRTPEVTCVVVDVSHEDPEVQFNWYVDGVEVHNAKTKPREEQFNSTFRVVSVLTVVHQDWLNGKEYKCKVSNKGLPAPIEKTISKTKGQPREPQVYTLPPSREEMTKNQVSLTCLVKGFYPSDIAVEWESNGQPENNYKTTPPMLDSDGSFFLYSKLTVDKSRWQQGNVFSCSVMHEALHNHYTQKSLSLSP

SEQ ID NO: 696 - protein, 324 aa, Artificial Sequence
  An artificially synthesized sequence
ASTKGCSVFPLAPCSRSTSESTAALGCLVKDYFPEPVTVSWNSGALTSGVHTFPAVLQSSGLYSLSSVVTVPSSNFGTQTYTCNVDHKPSNTKVDKTVERKCCVECPPCPAPPVAGPSVFLFPPKPKDTLMISRTPEVTCVVVDVSHEDPEVQFNWYVDGVEVHNAKTKPREEQFNSTFRVVSVLTVVHQDWLNGKEYKCKVSNKGLPAPIEKTISKTKGQPREPQVYTLPPSREEMTKNQVSLTCLVKGFYPSDIAVEWESNGQPENNYKTTPPMLDSDGSFFLYSKLTVDKSRWQQGNVFSCSVMHEALHNHYTQKSLSLSP

SEQ ID NO: 697 - protein, 324 aa, Artificial Sequence
  An artificially synthesized sequence
ASTKGPCVFPLAPCSRSTSESTAALGCLVKDYFPEPVTVSWNSGALTSGVHTFPAVLQSSGLYSLSSVVTVPSSNFGTQTYTCNVDHKPSNTKVDKTVERKCCVECPPCPAPPVAGPSVFLFPPKPKDTLMISRTPEVTCVVVDVSHEDPEVQFNWYVDGVEVHNAKTKPREEQFNSTFRVVSVLTVVHQDWLNGKEYKCKVSNKGLPAPIEKTISKTKGQPREPQVYTLPPSREEMTKNQVSLTCLVKGFYPSDIAVEWESNGQPENNYKTTPPMLDSDGSFFLYSKLTVDKSRWQQGNVFSCSVMHEALHNHYTQKSLSLSP

SEQ ID NO: 698 - protein, 324 aa, Artificial Sequence
  An artificially synthesized sequence
ASTKGPSCFPLAPCSRSTSESTAALGCLVKDYFPEPVTVSWNSGALTSGVHTFPAVLQSSGLYSLSSVVTVPSSNFGTQTYTCNVDHKPSNTKVDKTVERKCCVECPPCPAPPVAGPSVFLFPPKPKDTLMISRTPEVTCVVVDVSHEDPEVQFNWYVDGVEVHNAKTKPREEQFNSTFRVVSVLTVVHQDWLNGKEYKCKVSNKGLPAPIEKTISKTKGQPREPQVYTLPPSREEMTKNQVSLTCLVKGFYPSDIAVEWESNGQPENNYKTTPPMLDSDGSFFLYSKLTVDKSRWQQGNVFSCSVMHEALHNHYTQKSLSLSP

SEQ ID NO: 699 - protein, 324 aa, Artificial Sequence
  An artificially synthesized sequence
ASTKGPSVCPLAPCSRSTSESTAALGCLVKDYFPEPVTVSWNSGALTSGVHTFPAVLQSSGLYSLSSVVTVPSSNFGTQTYTCNVDHKPSNTKVDKTVERKCCVECPPCPAPPVAGPSVFLFPPKPKDTLMISRTPEVTCVVVDVSHEDPEVQFNWYVDGVEVHNAKTKPREEQFNSTFRVVSVLTVVHQDWLNGKEYKCKVSNKGLPAPIEKTISKTKGQPREPQVYTLPPSREEMTKNQVSLTCLVKGFYPSDIAVEWESNGQPENNYKTTPPMLDSDGSFFLYSKLTVDKSRWQQGNVFSCSVMHEALHNHYTQKSLSLSP

SEQ ID NO: 700 - protein, 324 aa, Artificial Sequence
  An artificially synthesized sequence
ASTKGPSVFCLAPCSRSTSESTAALGCLVKDYFPEPVTVSWNSGALTSGVHTFPAVLQSSGLYSLSSVVTVPSSNFGTQTYTCNVDHKPSNTKVDKTVERKCCVECPPCPAPPVAGPSVFLFPPKPKDTLMISRTPEVTCVVVDVSHEDPEVQFNWYVDGVEVHNAKTKPREEQFNSTFRVVSVLTVVHQDWLNGKEYKCKVSNKGLPAPIEKTISKTKGQPREPQVYTLPPSREEMTKNQVSLTCLVKGFYPSDIAVEWESNGQPENNYKTTPPMLDSDGSFFLYSKLTVDKSRWQQGNVFSCSVMHEALHNHYTQKSLSLSP

SEQ ID NO: 701 - protein, 324 aa, Artificial Sequence
  An artificially synthesized sequence
ASTKGPSVFPLAPCCRSTSESTAALGCLVKDYFPEPVTVSWNSGALTSGVHTFPAVLQSSGLYSLSSVVTVPSSNFGTQTYTCNVDHKPSNTKVDKTVERKCCVECPPCPAPPVAGPSVFLFPPKPKDTLMISRTPEVTCVVVDVSHEDPEVQFNWYVDGVEVHNAKTKPREEQFNSTFRVVSVLTVVHQDWLNGKEYKCKVSNKGLPAPIEKTISKTKGQPREPQVYTLPPSREEMTKNQVSLTCLVKGFYPSDIAVEWESNGQPENNYKTTPPMLDSDGSFFLYSKLTVDKSRWQQGNVFSCSVMHEALHNHYTQKSLSLSP

SEQ ID NO: 702 - protein, 324 aa, Artificial Sequence
  An artificially synthesized sequence
ASTKGPSVFPLAPCSCSTSESTAALGCLVKDYFPEPVTVSWNSGALTSGVHTFPAVLQSSGLYSLSSVVTVPSSNFGTQTYTCNVDHKPSNTKVDKTVERKCCVECPPCPAPPVAGPSVFLFPPKPKDTLMISRTPEVTCVVVDVSHEDPEVQFNWYVDGVEVHNAKTKPREEQFNSTFRVVSVLTVVHQDWLNGKEYKCKVSNKGLPAPIEKTISKTKGQPREPQVYTLPPSREEMTKNQVSLTCLVKGFYPSDIAVEWESNGQPENNYKTTPPMLDSDGSFFLYSKLTVDKSRWQQGNVFSCSVMHEALHNHYTQKSLSLSP

SEQ ID NO: 703 - protein, 324 aa, Artificial Sequence
  An artificially synthesized sequence
ASTKGPSVFPLAPCSRCTSESTAALGCLVKDYFPEPVTVSWNSGALTSGVHTFPAVLQSSGLYSLSSVVTVPSSNFGTQTYTCNVDHKPSNTKVDKTVERKCCVECPPCPAPPVAGPSVFLFPPKPKDTLMISRTPEVTCVVVDVSHEDPEVQFNWYVDGVEVHNAKTKPREEQFNSTFRVVSVLTVVHQDWLNGKEYKCKVSNKGLPAPIEKTISKTKGQPREPQVYTLPPSREEMTKNQVSLTCLVKGFYPSDIAVEWESNGQPENNYKTTPPMLDSDGSFFLYSKLTVDKSRWQQGNVFSCSVMHEALHNHYTQKSLSLSP

SEQ ID NO: 704 - protein, 324 aa, Artificial Sequence
  An artificially synthesized sequence
ASTKGPSVFPLAPCSRSCSESTAALGCLVKDYFPEPVTVSWNSGALTSGVHTFPAVLQSSGLYSLSSVVTVPSSNFGTQTYTCNVDHKPSNTKVDKTVERKCCVECPPCPAPPVAGPSVFLFPPKPKDTLMISRTPEVTCVVVDVSHEDPEVQFNWYVDGVEVHNAKTKPREEQFNSTFRVVSVLTVVHQDWLNGKEYKCKVSNKGLPAPIEKTISKTKGQPREPQVYTLPPSREEMTKNQVSLTCLVKGFYPSDIAVEWESNGQPENNYKTTPPMLDSDGSFFLYSKLTVDKSRWQQGNVFSCSVMHEALHNHYTQKSLSLSP

SEQ ID NO: 705 - protein, 324 aa, Artificial Sequence
  An artificially synthesized sequence
ASTKGPSVFPLAPCSRSTCESTAALGCLVKDYFPEPVTVSWNSGALTSGVHTFPAVLQSSGLYSLSSVVTVPSSNFGTQTYTCNVDHKPSNTKVDKTVERKCCVECPPCPAPPVAGPSVFLFPPKPKDTLMISRTPEVTCVVVDVSHEDPEVQFNWYVDGVEVHNAKTKPREEQFNSTFRVVSVLTVVHQDWLNGKEYKCKVSNKGLPAPIEKTISKTKGQPREPQVYTLPPSREEMTKNQVSLTCLVKGFYPSDIAVEWESNGQPENNYKTTPPMLDSDGSFFLYSKLTVDKSRWQQGNVFSCSVMHEALHNHYTQKSLSLSP

SEQ ID NO: 706 - protein, 324 aa, Artificial Sequence
  An artificially synthesized sequence
ASTKGPSVFPLAPCSRSTSCSTAALGCLVKDYFPEPVTVSWNSGALTSGVHTFPAVLQSSGLYSLSSVVTVPSSNFGTQTYTCNVDHKPSNTKVDKTVERKCCVECPPCPAPPVAGPSVFLFPPKPKDTLMISRTPEVTCVVVDVSHEDPEVQFNWYVDGVEVHNAKTKPREEQFNSTFRVVSVLTVVHQDWLNGKEYKCKVSNKGLPAPIEKTISKTKGQPREPQVYTLPPSREEMTKNQVSLTCLVKGFYPSDIAVEWESNGQPENNYKTTPPMLDSDGSFFLYSKLTVDKSRWQQGNVFSCSVMHEALHNHYTQKSLSLSP

SEQ ID NO: 707 - protein, 324 aa, Artificial Sequence
  An artificially synthesized sequence
ASTKGPSVFPLAPCSRSTSECTAALGCLVKDYFPEPVTVSWNSGALTSGVHTFPAVLQSSGLYSLSSVVTVPSSNFGTQTYTCNVDHKPSNTKVDKTVERKCCVECPPCPAPPVAGPSVFLFPPKPKDTLMISRTPEVTCVVVDVSHEDPEVQFNWYVDGVEVHNAKTKPREEQFNSTFRVVSVLTVVHQDWLNGKEYKCKVSNKGLPAPIEKTISKTKGQPREPQVYTLPPSREEMTKNQVSLTCLVKGFYPSDIAVEWESNGQPENNYKTTPPMLDSDGSFFLYSKLTVDKSRWQQGNVFSCSVMHEALHNHYTQKSLSLSP

SEQ ID NO: 708 - protein, 324 aa, Artificial Sequence
  An artificially synthesized sequence
ASTKGPSVFPLAPCSRSTSESCAALGCLVKDYFPEPVTVSWNSGALTSGVHTFPAVLQSSGLYSLSSVVTVPSSNFGTQTYTCNVDHKPSNTKVDKTVERKCCVECPPCPAPPVAGPSVFLFPPKPKDTLMISRTPEVTCVVVDVSHEDPEVQFNWYVDGVEVHNAKTKPREEQFNSTFRVVSVLTVVHQDWLNGKEYKCKVSNKGLPAPIEKTISKTKGQPREPQVYTLPPSREEMTKNQVSLTCLVKGFYPSDIAVEWESNGQPENNYKTTPPMLDSDGSFFLYSKLTVDKSRWQQGNVFSCSVMHEALHNHYTQKSLSLSP

SEQ ID NO: 709 - protein, 324 aa, Artificial Sequence
  An artificially synthesized sequence
ASTKGPSVFPLAPCSRSTSESTCALGCLVKDYFPEPVTVSWNSGALTSGVHTFPAVLQSSGLYSLSSVVTVPSSNFGTQTYTCNVDHKPSNTKVDKTVERKCCVECPPCPAPPVAGPSVFLFPPKPKDTLMISRTPEVTCVVVDVSHEDPEVQFNWYVDGVEVHNAKTKPREEQFNSTFRVVSVLTVVHQDWLNGKEYKCKVSNKGLPAPIEKTISKTKGQPREPQVYTLPPSREEMTKNQVSLTCLVKGFYPSDIAVEWESNGQPENNYKTTPPMLDSDGSFFLYSKLTVDKSRWQQGNVFSCSVMHEALHNHYTQKSLSLSP

SEQ ID NO: 710 - protein, 324 aa, Artificial Sequence
  An artificially synthesized sequence
ASTKGPSVFPLAPCSRSTSESTACLGCLVKDYFPEPVTVSWNSGALTSGVHTFPAVLQSSGLYSLSSVVTVPSSNFGTQTYTCNVDHKPSNTKVDKTVERKCCVECPPCPAPPVAGPSVFLFPPKPKDTLMISRTPEVTCVVVDVSHEDPEVQFNWYVDGVEVHNAKTKPREEQFNSTFRVVSVLTVVHQDWLNGKEYKCKVSNKGLPAPIEKTISKTKGQPREPQVYTLPPSREEMTKNQVSLTCLVKGFYPSDIAVEWESNGQPENNYKTTPPMLDSDGSFFLYSKLTVDKSRWQQGNVFSCSVMHEALHNHYTQKSLSLSP

SEQ ID NO: 711 - protein, 324 aa, Artificial Sequence
  An artificially synthesized sequence
ASTKGPSVFPLAPCSRSTSESTAALGCLVKCYFPEPVTVSWNSGALTSGVHTFPAVLQSSGLYSLSSVVTVPSSNFGTQTYTCNVDHKPSNTKVDKTVERKCCVECPPCPAPPVAGPSVFLFPPKPKDTLMISRTPEVTCVVVDVSHEDPEVQFNWYVDGVEVHNAKTKPREEQFNSTFRVVSVLTVVHQDWLNGKEYKCKVSNKGLPAPIEKTISKTKGQPREPQVYTLPPSREEMTKNQVSLTCLVKGFYPSDIAVEWESNGQPENNYKTTPPMLDSDGSFFLYSKLTVDKSRWQQGNVFSCSVMHEALHNHYTQKSLSLSP

SEQ ID NO: 712 - protein, 324 aa, Artificial Sequence
  An artificially synthesized sequence
ASTKGPSVFPLAPCSRSTSESTAALGCLVKDCFPEPVTVSWNSGALTSGVHTFPAVLQSSGLYSLSSVVTVPSSNFGTQTYTCNVDHKPSNTKVDKTVERKCCVECPPCPAPPVAGPSVFLFPPKPKDTLMISRTPEVTCVVVDVSHEDPEVQFNWYVDGVEVHNAKTKPREEQFNSTFRVVSVLTVVHQDWLNGKEYKCKVSNKGLPAPIEKTISKTKGQPREPQVYTLPPSREEMTKNQVSLTCLVKGFYPSDIAVEWESNGQPENNYKTTPPMLDSDGSFFLYSKLTVDKSRWQQGNVFSCSVMHEALHNHYTQKSLSLSP

SEQ ID NO: 713 - protein, 324 aa, Artificial Sequence
  An artificially synthesized sequence
ASTKGPSVFPLAPCSRSTSESTAALGCLVKDYCPEPVTVSWNSGALTSGVHTFPAVLQSSGLYSLSSVVTVPSSNFGTQTYTCNVDHKPSNTKVDKTVERKCCVECPPCPAPPVAGPSVFLFPPKPKDTLMISRTPEVTCVVVDVSHEDPEVQFNWYVDGVEVHNAKTKPREEQFNSTFRVVSVLTVVHQDWLNGKEYKCKVSNKGLPAPIEKTISKTKGQPREPQVYTLPPSREEMTKNQVSLTCLVKGFYPSDIAVEWESNGQPENNYKTTPPMLDSDGSFFLYSKLTVDKSRWQQGNVFSCSVMHEALHNHYTQKSLSLSP

SEQ ID NO: 714 - protein, 324 aa, Artificial Sequence
  An artificially synthesized sequence
ASTKGPSVFPLAPCSRSTSESTAALGCLVKDYFCEPVTVSWNSGALTSGVHTFPAVLQSSGLYSLSSVVTVPSSNFGTQTYTCNVDHKPSNTKVDKTVERKCCVECPPCPAPPVAGPSVFLFPPKPKDTLMISRTPEVTCVVVDVSHEDPEVQFNWYVDGVEVHNAKTKPREEQFNSTFRVVSVLTVVHQDWLNGKEYKCKVSNKGLPAPIEKTISKTKGQPREPQVYTLPPSREEMTKNQVSLTCLVKGFYPSDIAVEWESNGQPENNYKTTPPMLDSDGSFFLYSKLTVDKSRWQQGNVFSCSVMHEALHNHYTQKSLSLSP

SEQ ID NO: 715 - protein, 324 aa, Artificial Sequence
  An artificially synthesized sequence
ASTKGPSVFPLAPCSRSTSESTAALGCLVKDYFPCPVTVSWNSGALTSGVHTFPAVLQSSGLYSLSSVVTVPSSNFGTQTYTCNVDHKPSNTKVDKTVERKCCVECPPCPAPPVAGPSVFLFPPKPKDTLMISRTPEVTCVVVDVSHEDPEVQFNWYVDGVEVHNAKTKPREEQFNSTFRVVSVLTVVHQDWLNGKEYKCKVSNKGLPAPIEKTISKTKGQPREPQVYTLPPSREEMTKNQVSLTCLVKGFYPSDIAVEWESNGQPENNYKTTPPMLDSDGSFFLYSKLTVDKSRWQQGNVFSCSVMHEALHNHYTQKSLSLSP

SEQ ID NO: 716 - protein, 324 aa, Artificial Sequence
  An artificially synthesized sequence
ASTKGPSVFPLAPCSRSTSESTAALGCLVKDYFPECVTVSWNSGALTSGVHTFPAVLQSSGLYSLSSVVTVPSSNFGTQTYTCNVDHKPSNTKVDKTVERKCCVECPPCPAPPVAGPSVFLFPPKPKDTLMISRTPEVTCVVVDVSHEDPEVQFNWYVDGVEVHNAKTKPREEQFNSTFRVVSVLTVVHQDWLNGKEYKCKVSNKGLPAPIEKTISKTKGQPREPQVYTLPPSREEMTKNQVSLTCLVKGFYPSDIAVEWESNGQPENNYKTTPPMLDSDGSFFLYSKLTVDKSRWQQGNVFSCSVMHEALHNHYTQKSLSLSP

SEQ ID NO: 717 - protein, 324 aa, Artificial Sequence
  An artificially synthesized sequence
ASTKGPSVFPLAPCSRSTSESTAALGCLVKDYFPEPCTVSWNSGALTSGVHTFPAVLQSSGLYSLSSVVTVPSSNFGTQTYTCNVDHKPSNTKVDKTVERKCCVECPPCPAPPVAGPSVFLFPPKPKDTLMISRTPEVTCVVVDVSHEDPEVQFNWYVDGVEVHNAKTKPREEQFNSTFRVVSVLTVVHQDWLNGKEYKCKVSNKGLPAPIEKTISKTKGQPREPQVYTLPPSREEMTKNQVSLTCLVKGFYPSDIAVEWESNGQPENNYKTTPPMLDSDGSFFLYSKLTVDKSRWQQGNVFSCSVMHEALHNHYTQKSLSLSP

SEQ ID NO: 718 - protein, 324 aa, Artificial Sequence
  An artificially synthesized sequence
ASTKGPSVFPLAPCSRSTSESTAALGCLVKDYFPEPVCVSWNSGALTSGVHTFPAVLQSSGLYSLSSVVTVPSSNFGTQTYTCNVDHKPSNTKVDKTVERKCCVECPPCPAPPVAGPSVFLFPPKPKDTLMISRTPEVTCVVVDVSHEDPEVQFNWYVDGVEVHNAKTKPREEQFNSTFRVVSVLTVVHQDWLNGKEYKCKVSNKGLPAPIEKTISKTKGQPREPQVYTLPPSREEMTKNQVSLTCLVKGFYPSDIAVEWESNGQPENNYKTTPPMLDSDGSFFLYSKLTVDKSRWQQGNVFSCSVMHEALHNHYTQKSLSLSP

SEQ ID NO: 719 - protein, 324 aa, Artificial Sequence
  An artificially synthesized sequence
ASTKGPSVFPLAPCSRSTSESTAALGCLVKDYFPEPVTCSWNSGALTSGVHTFPAVLQSSGLYSLSSVVTVPSSNFGTQTYTCNVDHKPSNTKVDKTVERKCCVECPPCPAPPVAGPSVFLFPPKPKDTLMISRTPEVTCVVVDVSHEDPEVQFNWYVDGVEVHNAKTKPREEQFNSTFRVVSVLTVVHQDWLNGKEYKCKVSNKGLPAPIEKTISKTKGQPREPQVYTLPPSREEMTKNQVSLTCLVKGFYPSDIAVEWESNGQPENNYKTTPPMLDSDGSFFLYSKLTVDKSRWQQGNVFSCSVMHEALHNHYTQKSLSLSP

SEQ ID NO: 720 - protein, 324 aa, Artificial Sequence
  An artificially synthesized sequence
ASTKGPSVFPLAPCSRSTSESTAALGCLVKDYFPEPVTVCWNSGALTSGVHTFPAVLQSSGLYSLSSVVTVPSSNFGTQTYTCNVDHKPSNTKVDKTVERKCCVECPPCPAPPVAGPSVFLFPPKPKDTLMISRTPEVTCVVVDVSHEDPEVQFNWYVDGVEVHNAKTKPREEQFNSTFRVVSVLTVVHQDWLNGKEYKCKVSNKGLPAPIEKTISKTKGQPREPQVYTLPPSREEMTKNQVSLTCLVKGFYPSDIAVEWESNGQPENNYKTTPPMLDSDGSFFLYSKLTVDKSRWQQGNVFSCSVMHEALHNHYTQKSLSLSP

SEQ ID NO: 721 - protein, 324 aa, Artificial Sequence
  An artificially synthesized sequence
ASTKGPSVFPLAPCSRSTSESTAALGCLVKDYFPEPVTVSCNSGALTSGVHTFPAVLQSSGLYSLSSVVTVPSSNFGTQTYTCNVDHKPSNTKVDKTVERKCCVECPPCPAPPVAGPSVFLFPPKPKDTLMISRTPEVTCVVVDVSHEDPEVQFNWYVDGVEVHNAKTKPREEQFNSTFRVVSVLTVVHQDWLNGKEYKCKVSNKGLPAPIEKTISKTKGQPREPQVYTLPPSREEMTKNQVSLTCLVKGFYPSDIAVEWESNGQPENNYKTTPPMLDSDGSFFLYSKLTVDKSRWQQGNVFSCSVMHEALHNHYTQKSLSLSP

SEQ ID NO: 722 - protein, 324 aa, Artificial Sequence
  An artificially synthesized sequence
ASTKGPSVFPLAPCSRSTSESTAALGCLVKDYFPEPVTVSWCSGALTSGVHTFPAVLQSSGLYSLSSVVTVPSSNFGTQTYTCNVDHKPSNTKVDKTVERKCCVECPPCPAPPVAGPSVFLFPPKPKDTLMISRTPEVTCVVVDVSHEDPEVQFNWYVDGVEVHNAKTKPREEQFNSTFRVVSVLTVVHQDWLNGKEYKCKVSNKGLPAPIEKTISKTKGQPREPQVYTLPPSREEMTKNQVSLTCLVKGFYPSDIAVEWESNGQPENNYKTTPPMLDSDGSFFLYSKLTVDKSRWQQGNVFSCSVMHEALHNHYTQKSLSLSP

SEQ ID NO: 723 - protein, 324 aa, Artificial Sequence
  An artificially synthesized sequence
ASTKGPSVFPLAPCSRSTSESTAALGCLVKDYFPEPVTVSWNCGALTSGVHTFPAVLQSSGLYSLSSVVTVPSSNFGTQTYTCNVDHKPSNTKVDKTVERKCCVECPPCPAPPVAGPSVFLFPPKPKDTLMISRTPEVTCVVVDVSHEDPEVQFNWYVDGVEVHNAKTKPREEQFNSTFRVVSVLTVVHQDWLNGKEYKCKVSNKGLPAPIEKTISKTKGQPREPQVYTLPPSREEMTKNQVSLTCLVKGFYPSDIAVEWESNGQPENNYKTTPPMLDSDGSFFLYSKLTVDKSRWQQGNVFSCSVMHEALHNHYTQKSLSLSP

SEQ ID NO: 724 - protein, 324 aa, Artificial Sequence
  An artificially synthesized sequence
ASTKGPSVFPLAPCSRSTSESTAALGCLVKDYFPEPVTVSWNSCALTSGVHTFPAVLQSSGLYSLSSVVTVPSSNFGTQTYTCNVDHKPSNTKVDKTVERKCCVECPPCPAPPVAGPSVFLFPPKPKDTLMISRTPEVTCVVVDVSHEDPEVQFNWYVDGVEVHNAKTKPREEQFNSTFRVVSVLTVVHQDWLNGKEYKCKVSNKGLPAPIEKTISKTKGQPREPQVYTLPPSREEMTKNQVSLTCLVKGFYPSDIAVEWESNGQPENNYKTTPPMLDSDGSFFLYSKLTVDKSRWQQGNVFSCSVMHEALHNHYTQKSLSLSP

SEQ ID NO: 725 - protein, 324 aa, Artificial Sequence
  An artificially synthesized sequence
ASTKGPSVFPLAPCSRSTSESTAALGCLVKDYFPEPVTVSWNSGCLTSGVHTFPAVLQSSGLYSLSSVVTVPSSNFGTQTYTCNVDHKPSNTKVDKTVERKCCVECPPCPAPPVAGPSVFLFPPKPKDTLMISRTPEVTCVVVDVSHEDPEVQFNWYVDGVEVHNAKTKPREEQFNSTFRVVSVLTVVHQDWLNGKEYKCKVSNKGLPAPIEKTISKTKGQPREPQVYTLPPSREEMTKNQVSLTCLVKGFYPSDIAVEWESNGQPENNYKTTPPMLDSDGSFFLYSKLTVDKSRWQQGNVFSCSVMHEALHNHYTQKSLSLSP

SEQ ID NO: 726 - protein, 324 aa, Artificial Sequence
  An artificially synthesized sequence
ASTKGPSVFPLAPCSRSTSESTAALGCLVKDYFPEPVTVSWNSGACTSGVHTFPAVLQSSGLYSLSSVVTVPSSNFGTQTYTCNVDHKPSNTKVDKTVERKCCVECPPCPAPPVAGPSVFLFPPKPKDTLMISRTPEVTCVVVDVSHEDPEVQFNWYVDGVEVHNAKTKPREEQFNSTFRVVSVLTVVHQDWLNGKEYKCKVSNKGLPAPIEKTISKTKGQPREPQVYTLPPSREEMTKNQVSLTCLVKGFYPSDIAVEWESNGQPENNYKTTPPMLDSDGSFFLYSKLTVDKSRWQQGNVFSCSVMHEALHNHYTQKSLSLSP

SEQ ID NO: 727 - protein, 324 aa, Artificial Sequence
  An artificially synthesized sequence
ASTKGPSVFPLAPCSRSTSESTAALGCLVKDYFPEPVTVSWNSGALCSGVHTFPAVLQSSGLYSLSSVVTVPSSNFGTQTYTCNVDHKPSNTKVDKTVERKCCVECPPCPAPPVAGPSVFLFPPKPKDTLMISRTPEVTCVVVDVSHEDPEVQFNWYVDGVEVHNAKTKPREEQFNSTFRVVSVLTVVHQDWLNGKEYKCKVSNKGLPAPIEKTISKTKGQPREPQVYTLPPSREEMTKNQVSLTCLVKGFYPSDIAVEWESNGQPENNYKTTPPMLDSDGSFFLYSKLTVDKSRWQQGNVFSCSVMHEALHNHYTQKSLSLSP

SEQ ID NO: 728 - protein, 324 aa, Artificial Sequence
  An artificially synthesized sequence
ASTKGPSVFPLAPCSRSTSESTAALGCLVKDYFPEPVTVSWNSGALTCGVHTFPAVLQSSGLYSLSSVVTVPSSNFGTQTYTCNVDHKPSNTKVDKTVERKCCVECPPCPAPPVAGPSVFLFPPKPKDTLMISRTPEVTCVVVDVSHEDPEVQFNWYVDGVEVHNAKTKPREEQFNSTFRVVSVLTVVHQDWLNGKEYKCKVSNKGLPAPIEKTISKTKGQPREPQVYTLPPSREEMTKNQVSLTCLVKGFYPSDIAVEWESNGQPENNYKTTPPMLDSDGSFFLYSKLTVDKSRWQQGNVFSCSVMHEALHNHYTQKSLSLSP

SEQ ID NO: 729 - protein, 324 aa, Artificial Sequence
  An artificially synthesized sequence
ASTKGPSVFPLAPCSRSTSESTAALGCLVKDYFPEPVTVSWNSGALTSCVHTFPAVLQSSGLYSLSSVVTVPSSNFGTQTYTCNVDHKPSNTKVDKTVERKCCVECPPCPAPPVAGPSVFLFPPKPKDTLMISRTPEVTCVVVDVSHEDPEVQFNWYVDGVEVHNAKTKPREEQFNSTFRVVSVLTVVHQDWLNGKEYKCKVSNKGLPAPIEKTISKTKGQPREPQVYTLPPSREEMTKNQVSLTCLVKGFYPSDIAVEWESNGQPENNYKTTPPMLDSDGSFFLYSKLTVDKSRWQQGNVFSCSVMHEALHNHYTQKSLSLSP

SEQ ID NO: 730 - protein, 324 aa, Artificial Sequence
  An artificially synthesized sequence
ASTKGPSVFPLAPCSRSTSESTAALGCLVKDYFPEPVTVSWNSGALTSGCHTFPAVLQSSGLYSLSSVVTVPSSNFGTQTYTCNVDHKPSNTKVDKTVERKCCVECPPCPAPPVAGPSVFLFPPKPKDTLMISRTPEVTCVVVDVSHEDPEVQFNWYVDGVEVHNAKTKPREEQFNSTFRVVSVLTVVHQDWLNGKEYKCKVSNKGLPAPIEKTISKTKGQPREPQVYTLPPSREEMTKNQVSLTCLVKGFYPSDIAVEWESNGQPENNYKTTPPMLDSDGSFFLYSKLTVDKSRWQQGNVFSCSVMHEALHNHYTQKSLSLSP

SEQ ID NO: 731 - protein, 324 aa, Artificial Sequence
  An artificially synthesized sequence
ASTKGPSVFPLAPCSRSTSESTAALGCLVKDYFPEPVTVSWNSGALTSGVHTFPACLQSSGLYSLSSVVTVPSSNFGTQTYTCNVDHKPSNTKVDKTVERKCCVECPPCPAPPVAGPSVFLFPPKPKDTLMISRTPEVTCVVVDVSHEDPEVQFNWYVDGVEVHNAKTKPREEQFNSTFRVVSVLTVVHQDWLNGKEYKCKVSNKGLPAPIEKTISKTKGQPREPQVYTLPPSREEMTKNQVSLTCLVKGFYPSDIAVEWESNGQPENNYKTTPPMLDSDGSFFLYSKLTVDKSRWQQGNVFSCSVMHEALHNHYTQKSLSLSP

SEQ ID NO: 732 - protein, 324 aa, Artificial Sequence
  An artificially synthesized sequence
ASTKGPSVFPLAPCSRSTSESTAALGCLVKDYFPEPVTVSWNSGALTSGVHTFPAVCQSSGLYSLSSVVTVPSSNFGTQTYTCNVDHKPSNTKVDKTVERKCCVECPPCPAPPVAGPSVFLFPPKPKDTLMISRTPEVTCVVVDVSHEDPEVQFNWYVDGVEVHNAKTKPREEQFNSTFRVVSVLTVVHQDWLNGKEYKCKVSNKGLPAPIEKTISKTKGQPREPQVYTLPPSREEMTKNQVSLTCLVKGFYPSDIAVEWESNGQPENNYKTTPPMLDSDGSFFLYSKLTVDKSRWQQGNVFSCSVMHEALHNHYTQKSLSLSP

SEQ ID NO: 733 - protein, 324 aa, Artificial Sequence
  An artificially synthesized sequence
ASTKGPSVFPLAPCSRSTSESTAALGCLVKDYFPEPVTVSWNSGALTSGVHTFPAVLCSSGLYSLSSVVTVPSSNFGTQTYTCNVDHKPSNTKVDKTVERKCCVECPPCPAPPVAGPSVFLFPPKPKDTLMISRTPEVTCVVVDVSHEDPEVQFNWYVDGVEVHNAKTKPREEQFNSTFRVVSVLTVVHQDWLNGKEYKCKVSNKGLPAPIEKTISKTKGQPREPQVYTLPPSREEMTKNQVSLTCLVKGFYPSDIAVEWESNGQPENNYKTTPPMLDSDGSFFLYSKLTVDKSRWQQGNVFSCSVMHEALHNHYTQKSLSLSP

SEQ ID NO: 734 - protein, 324 aa, Artificial Sequence
  An artificially synthesized sequence
ASTKGPSVFPLAPCSRSTSESTAALGCLVKDYFPEPVTVSWNSGALTSGVHTFPAVLQCSGLYSLSSVVTVPSSNFGTQTYTCNVDHKPSNTKVDKTVERKCCVECPPCPAPPVAGPSVFLFPPKPKDTLMISRTPEVTCVVVDVSHEDPEVQFNWYVDGVEVHNAKTKPREEQFNSTFRVVSVLTVVHQDWLNGKEYKCKVSNKGLPAPIEKTISKTKGQPREPQVYTLPPSREEMTKNQVSLTCLVKGFYPSDIAVEWESNGQPENNYKTTPPMLDSDGSFFLYSKLTVDKSRWQQGNVFSCSVMHEALHNHYTQKSLSLSP

SEQ ID NO: 735 - protein, 324 aa, Artificial Sequence
  An artificially synthesized sequence
ASTKGPSVFPLAPCSRSTSESTAALGCLVKDYFPEPVTVSWNSGALTSGVHTFPAVLQSCGLYSLSSVVTVPSSNFGTQTYTCNVDHKPSNTKVDKTVERKCCVECPPCPAPPVAGPSVFLFPPKPKDTLMISRTPEVTCVVVDVSHEDPEVQFNWYVDGVEVHNAKTKPREEQFNSTFRVVSVLTVVHQDWLNGKEYKCKVSNKGLPAPIEKTISKTKGQPREPQVYTLPPSREEMTKNQVSLTCLVKGFYPSDIAVEWESNGQPENNYKTTPPMLDSDGSFFLYSKLTVDKSRWQQGNVFSCSVMHEALHNHYTQKSLSLSP

SEQ ID NO: 736 - protein, 324 aa, Artificial Sequence
  An artificially synthesized sequence
ASTKGPSVFPLAPCSRSTSESTAALGCLVKDYFPEPVTVSWNSGALTSGVHTFPAVLQSSCLYSLSSVVTVPSSNFGTQTYTCNVDHKPSNTKVDKTVERKCCVECPPCPAPPVAGPSVFLFPPKPKDTLMISRTPEVTCVVVDVSHEDPEVQFNWYVDGVEVHNAKTKPREEQFNSTFRVVSVLTVVHQDWLNGKEYKCKVSNKGLPAPIEKTISKTKGQPREPQVYTLPPSREEMTKNQVSLTCLVKGFYPSDIAVEWESNGQPENNYKTTPPMLDSDGSFFLYSKLTVDKSRWQQGNVFSCSVMHEALHNHYTQKSLSLSP

SEQ ID NO: 737 - protein, 324 aa, Artificial Sequence
  An artificially synthesized sequence
ASTKGPSVFPLAPCSRSTSESTAALGCLVKDYFPEPVTVSWNSGALTSGVHTFPAVLQSSGCYSLSSVVTVPSSNFGTQTYTCNVDHKPSNTKVDKTVERKCCVECPPCPAPPVAGPSVFLFPPKPKDTLMISRTPEVTCVVVDVSHEDPEVQFNWYVDGVEVHNAKTKPREEQFNSTFRVVSVLTVVHQDWLNGKEYKCKVSNKGLPAPIEKTISKTKGQPREPQVYTLPPSREEMTKNQVSLTCLVKGFYPSDIAVEWESNGQPENNYKTTPPMLDSDGSFFLYSKLTVDKSRWQQGNVFSCSVMHEALHNHYTQKSLSLSP

SEQ ID NO: 738 - protein, 324 aa, Artificial Sequence
  An artificially synthesized sequence
ASTKGPSVFPLAPCSRSTSESTAALGCLVKDYFPEPVTVSWNSGALTSGVHTFPAVLQSSGLCSLSSVVTVPSSNFGTQTYTCNVDHKPSNTKVDKTVERKCCVECPPCPAPPVAGPSVFLFPPKPKDTLMISRTPEVTCVVVDVSHEDPEVQFNWYVDGVEVHNAKTKPREEQFNSTFRVVSVLTVVHQDWLNGKEYKCKVSNKGLPAPIEKTISKTKGQPREPQVYTLPPSREEMTKNQVSLTCLVKGFYPSDIAVEWESNGQPENNYKTTPPMLDSDGSFFLYSKLTVDKSRWQQGNVFSCSVMHEALHNHYTQKSLSLSP

SEQ ID NO: 739 - protein, 324 aa, Artificial Sequence
  An artificially synthesized sequence
ASTKGPSVFPLAPCSRSTSESTAALGCLVKDYFPEPVTVSWNSGALTSGVHTFPAVLQSSGLYSLSSVCTVPSSNFGTQTYTCNVDHKPSNTKVDKTVERKCCVECPPCPAPPVAGPSVFLFPPKPKDTLMISRTPEVTCVVVDVSHEDPEVQFNWYVDGVEVHNAKTKPREEQFNSTFRVVSVLTVVHQDWLNGKEYKCKVSNKGLPAPIEKTISKTKGQPREPQVYTLPPSREEMTKNQVSLTCLVKGFYPSDIAVEWESNGQPENNYKTTPPMLDSDGSFFLYSKLTVDKSRWQQGNVFSCSVMHEALHNHYTQKSLSLSP

SEQ ID NO: 740 - protein, 324 aa, Artificial Sequence
  An artificially synthesized sequence
ASTKGPSVFPLAPCSRSTSESTAALGCLVKDYFPEPVTVSWNSGALTSGVHTFPAVLQSSGLYSLSSVVCVPSSNFGTQTYTCNVDHKPSNTKVDKTVERKCCVECPPCPAPPVAGPSVFLFPPKPKDTLMISRTPEVTCVVVDVSHEDPEVQFNWYVDGVEVHNAKTKPREEQFNSTFRVVSVLTVVHQDWLNGKEYKCKVSNKGLPAPIEKTISKTKGQPREPQVYTLPPSREEMTKNQVSLTCLVKGFYPSDIAVEWESNGQPENNYKTTPPMLDSDGSFFLYSKLTVDKSRWQQGNVFSCSVMHEALHNHYTQKSLSLSP

SEQ ID NO: 741 - protein, 324 aa, Artificial Sequence
  An artificially synthesized sequence
ASTKGPSVFPLAPCSRSTSESTAALGCLVKDYFPEPVTVSWNSGALTSGVHTFPAVLQSSGLYSLSSVVTCPSSNFGTQTYTCNVDHKPSNTKVDKTVERKCCVECPPCPAPPVAGPSVFLFPPKPKDTLMISRTPEVTCVVVDVSHEDPEVQFNWYVDGVEVHNAKTKPREEQFNSTFRVVSVLTVVHQDWLNGKEYKCKVSNKGLPAPIEKTISKTKGQPREPQVYTLPPSREEMTKNQVSLTCLVKGFYPSDIAVEWESNGQPENNYKTTPPMLDSDGSFFLYSKLTVDKSRWQQGNVFSCSVMHEALHNHYTQKSLSLSP

SEQ ID NO: 742 - protein, 324 aa, Artificial Sequence
  An artificially synthesized sequence
ASTKGPSVFPLAPCSRSTSESTAALGCLVKDYFPEPVTVSWNSGALTSGVHTFPAVLQSSGLYSLSSVVTVCSSNFGTQTYTCNVDHKPSNTKVDKTVERKCCVECPPCPAPPVAGPSVFLFPPKPKDTLMISRTPEVTCVVVDVSHEDPEVQFNWYVDGVEVHNAKTKPREEQFNSTFRVVSVLTVVHQDWLNGKEYKCKVSNKGLPAPIEKTISKTKGQPREPQVYTLPPSREEMTKNQVSLTCLVKGFYPSDIAVEWESNGQPENNYKTTPPMLDSDGSFFLYSKLTVDKSRWQQGNVFSCSVMHEALHNHYTQKSLSLSP

SEQ ID NO: 743 - protein, 324 aa, Artificial Sequence
  An artificially synthesized sequence
ASTKGPSVFPLAPCSRSTSESTAALGCLVKDYFPEPVTVSWNSGALTSGVHTFPAVLQSSGLYSLSSVVTVPCSNFGTQTYTCNVDHKPSNTKVDKTVERKCCVECPPCPAPPVAGPSVFLFPPKPKDTLMISRTPEVTCVVVDVSHEDPEVQFNWYVDGVEVHNAKTKPREEQFNSTFRVVSVLTVVHQDWLNGKEYKCKVSNKGLPAPIEKTISKTKGQPREPQVYTLPPSREEMTKNQVSLTCLVKGFYPSDIAVEWESNGQPENNYKTTPPMLDSDGSFFLYSKLTVDKSRWQQGNVFSCSVMHEALHNHYTQKSLSLSP

SEQ ID NO: 744 - protein, 324 aa, Artificial Sequence
  An artificially synthesized sequence
ASTKGPSVFPLAPCSRSTSESTAALGCLVKDYFPEPVTVSWNSGALTSGVHTFPAVLQSSGLYSLSSVVTVPSCNFGTQTYTCNVDHKPSNTKVDKTVERKCCVECPPCPAPPVAGPSVFLFPPKPKDTLMISRTPEVTCVVVDVSHEDPEVQFNWYVDGVEVHNAKTKPREEQFNSTFRVVSVLTVVHQDWLNGKEYKCKVSNKGLPAPIEKTISKTKGQPREPQVYTLPPSREEMTKNQVSLTCLVKGFYPSDIAVEWESNGQPENNYKTTPPMLDSDGSFFLYSKLTVDKSRWQQGNVFSCSVMHEALHNHYTQKSLSLSP

SEQ ID NO: 745 - protein, 324 aa, Artificial Sequence
  An artificially synthesized sequence
ASTKGPSVFPLAPCSRSTSESTAALGCLVKDYFPEPVTVSWNSGALTSGVHTFPAVLQSSGLYSLSSVVTVPSSCFGTQTYTCNVDHKPSNTKVDKTVERKCCVECPPCPAPPVAGPSVFLFPPKPKDTLMISRTPEVTCVVVDVSHEDPEVQFNWYVDGVEVHNAKTKPREEQFNSTFRVVSVLTVVHQDWLNGKEYKCKVSNKGLPAPIEKTISKTKGQPREPQVYTLPPSREEMTKNQVSLTCLVKGFYPSDIAVEWESNGQPENNYKTTPPMLDSDGSFFLYSKLTVDKSRWQQGNVFSCSVMHEALHNHYTQKSLSLSP

SEQ ID NO: 746 - protein, 324 aa, Artificial Sequence
  An artificially synthesized sequence
ASTKGPSVFPLAPCSRSTSESTAALGCLVKDYFPEPVTVSWNSGALTSGVHTFPAVLQSSGLYSLSSVVTVPSSNCGTQTYTCNVDHKPSNTKVDKTVERKCCVECPPCPAPPVAGPSVFLFPPKPKDTLMISRTPEVTCVVVDVSHEDPEVQFNWYVDGVEVHNAKTKPREEQFNSTFRVVSVLTVVHQDWLNGKEYKCKVSNKGLPAPIEKTISKTKGQPREPQVYTLPPSREEMTKNQVSLTCLVKGFYPSDIAVEWESNGQPENNYKTTPPMLDSDGSFFLYSKLTVDKSRWQQGNVFSCSVMHEALHNHYTQKSLSLSP

SEQ ID NO: 747 - protein, 324 aa, Artificial Sequence
  An artificially synthesized sequence
ASTKGPSVFPLAPCSRSTSESTAALGCLVKDYFPEPVTVSWNSGALTSGVHTFPAVLQSSGLYSLSSVVTVPSSNFCTQTYTCNVDHKPSNTKVDKTVERKCCVECPPCPAPPVAGPSVFLFPPKPKDTLMISRTPEVTCVVVDVSHEDPEVQFNWYVDGVEVHNAKTKPREEQFNSTFRVVSVLTVVHQDWLNGKEYKCKVSNKGLPAPIEKTISKTKGQPREPQVYTLPPSREEMTKNQVSLTCLVKGFYPSDIAVEWESNGQPENNYKTTPPMLDSDGSFFLYSKLTVDKSRWQQGNVFSCSVMHEALHNHYTQKSLSLSP

SEQ ID NO: 748 - protein, 324 aa, Artificial Sequence
  An artificially synthesized sequence
ASTKGPSVFPLAPCSRSTSESTAALGCLVKDYFPEPVTVSWNSGALTSGVHTFPAVLQSSGLYSLSSVVTVPSSNFGCQTYTCNVDHKPSNTKVDKTVERKCCVECPPCPAPPVAGPSVFLFPPKPKDTLMISRTPEVTCVVVDVSHEDPEVQFNWYVDGVEVHNAKTKPREEQFNSTFRVVSVLTVVHQDWLNGKEYKCKVSNKGLPAPIEKTISKTKGQPREPQVYTLPPSREEMTKNQVSLTCLVKGFYPSDIAVEWESNGQPENNYKTTPPMLDSDGSFFLYSKLTVDKSRWQQGNVFSCSVMHEALHNHYTQKSLSLSP

SEQ ID NO: 749 - protein, 324 aa, Artificial Sequence
  An artificially synthesized sequence
ASTKGPSVFPLAPCSRSTSESTAALGCLVKDYFPEPVTVSWNSGALTSGVHTFPAVLQSSGLYSLSSVVTVPSSNFGTCTYTCNVDHKPSNTKVDKTVERKCCVECPPCPAPPVAGPSVFLFPPKPKDTLMISRTPEVTCVVVDVSHEDPEVQFNWYVDGVEVHNAKTKPREEQFNSTFRVVSVLTVVHQDWLNGKEYKCKVSNKGLPAPIEKTISKTKGQPREPQVYTLPPSREEMTKNQVSLTCLVKGFYPSDIAVEWESNGQPENNYKTTPPMLDSDGSFFLYSKLTVDKSRWQQGNVFSCSVMHEALHNHYTQKSLSLSP

SEQ ID NO: 750 - protein, 324 aa, Artificial Sequence
  An artificially synthesized sequence
ASTKGPSVFPLAPCSRSTSESTAALGCLVKDYFPEPVTVSWNSGALTSGVHTFPAVLQSSGLYSLSSVVTVPSSNFGTQCYTCNVDHKPSNTKVDKTVERKCCVECPPCPAPPVAGPSVFLFPPKPKDTLMISRTPEVTCVVVDVSHEDPEVQFNWYVDGVEVHNAKTKPREEQFNSTFRVVSVLTVVHQDWLNGKEYKCKVSNKGLPAPIEKTISKTKGQPREPQVYTLPPSREEMTKNQVSLTCLVKGFYPSDIAVEWESNGQPENNYKTTPPMLDSDGSFFLYSKLTVDKSRWQQGNVFSCSVMHEALHNHYTQKSLSLSP

SEQ ID NO: 751 - protein, 324 aa, Artificial Sequence
  An artificially synthesized sequence
ASTKGPSVFPLAPCSRSTSESTAALGCLVKDYFPEPVTVSWNSGALTSGVHTFPAVLQSSGLYSLSSVVTVPSSNFGTQTCTCNVDHKPSNTKVDKTVERKCCVECPPCPAPPVAGPSVFLFPPKPKDTLMISRTPEVTCVVVDVSHEDPEVQFNWYVDGVEVHNAKTKPREEQFNSTFRVVSVLTVVHQDWLNGKEYKCKVSNKGLPAPIEKTISKTKGQPREPQVYTLPPSREEMTKNQVSLTCLVKGFYPSDIAVEWESNGQPENNYKTTPPMLDSDGSFFLYSKLTVDKSRWQQGNVFSCSVMHEALHNHYTQKSLSLSP

SEQ ID NO: 752 - protein, 324 aa, Artificial Sequence
  An artificially synthesized sequence
ASTKGPSVFPLAPCSRSTSESTAALGCLVKDYFPEPVTVSWNSGALTSGVHTFPAVLQSSGLYSLSSVVTVPSSNFGTQTYCCNVDHKPSNTKVDKTVERKCCVECPPCPAPPVAGPSVFLFPPKPKDTLMISRTPEVTCVVVDVSHEDPEVQFNWYVDGVEVHNAKTKPREEQFNSTFRVVSVLTVVHQDWLNGKEYKCKVSNKGLPAPIEKTISKTKGQPREPQVYTLPPSREEMTKNQVSLTCLVKGFYPSDIAVEWESNGQPENNYKTTPPMLDSDGSFFLYSKLTVDKSRWQQGNVFSCSVMHEALHNHYTQKSLSLSP

SEQ ID NO: 753 - protein, 324 aa, Artificial Sequence
  An artificially synthesized sequence
ASTKGPSVFPLAPCSRSTSESTAALGCLVKDYFPEPVTVSWNSGALTSGVHTFPAVLQSSGLYSLSSVVTVPSSNFGTQTYTCCVDHKPSNTKVDKTVERKCCVECPPCPAPPVAGPSVFLFPPKPKDTLMISRTPEVTCVVVDVSHEDPEVQFNWYVDGVEVHNAKTKPREEQFNSTFRVVSVLTVVHQDWLNGKEYKCKVSNKGLPAPIEKTISKTKGQPREPQVYTLPPSREEMTKNQVSLTCLVKGFYPSDIAVEWESNGQPENNYKTTPPMLDSDGSFFLYSKLTVDKSRWQQGNVFSCSVMHEALHNHYTQKSLSLSP

SEQ ID NO: 754 - protein, 324 aa, Artificial Sequence
  An artificially synthesized sequence
ASTKGPSVFPLAPCSRSTSESTAALGCLVKDYFPEPVTVSWNSGALTSGVHTFPAVLQSSGLYSLSSVVTVPSSNFGTQTYTCNCDHKPSNTKVDKTVERKCCVECPPCPAPPVAGPSVFLFPPKPKDTLMISRTPEVTCVVVDVSHEDPEVQFNWYVDGVEVHNAKTKPREEQFNSTFRVVSVLTVVHQDWLNGKEYKCKVSNKGLPAPIEKTISKTKGQPREPQVYTLPPSREEMTKNQVSLTCLVKGFYPSDIAVEWESNGQPENNYKTTPPMLDSDGSFFLYSKLTVDKSRWQQGNVFSCSVMHEALHNHYTQKSLSLSP

SEQ ID NO: 755 - protein, 324 aa, Artificial Sequence
  An artificially synthesized sequence
ASTKGPSVFPLAPCSRSTSESTAALGCLVKDYFPEPVTVSWNSGALTSGVHTFPAVLQSSGLYSLSSVVTVPSSNFGTQTYTCNVCHKPSNTKVDKTVERKCCVECPPCPAPPVAGPSVFLFPPKPKDTLMISRTPEVTCVVVDVSHEDPEVQFNWYVDGVEVHNAKTKPREEQFNSTFRVVSVLTVVHQDWLNGKEYKCKVSNKGLPAPIEKTISKTKGQPREPQVYTLPPSREEMTKNQVSLTCLVKGFYPSDIAVEWESNGQPENNYKTTPPMLDSDGSFFLYSKLTVDKSRWQQGNVFSCSVMHEALHNHYTQKSLSLSP

SEQ ID NO: 756 - protein, 324 aa, Artificial Sequence
  An artificially synthesized sequence
ASTKGPSVFPLAPCSRSTSESTAALGCLVKDYFPEPVTVSWNSGALTSGVHTFPAVLQSSGLYSLSSVVTVPSSNFGTQTYTCNVDCKPSNTKVDKTVERKCCVECPPCPAPPVAGPSVFLFPPKPKDTLMISRTPEVTCVVVDVSHEDPEVQFNWYVDGVEVHNAKTKPREEQFNSTFRVVSVLTVVHQDWLNGKEYKCKVSNKGLPAPIEKTISKTKGQPREPQVYTLPPSREEMTKNQVSLTCLVKGFYPSDIAVEWESNGQPENNYKTTPPMLDSDGSFFLYSKLTVDKSRWQQGNVFSCSVMHEALHNHYTQKSLSLSP

SEQ ID NO: 757 - protein, 324 aa, Artificial Sequence
  An artificially synthesized sequence
ASTKGPSVFPLAPCSRSTSESTAALGCLVKDYFPEPVTVSWNSGALTSGVHTFPAVLQSSGLYSLSSVVTVPSSNFGTQTYTCNVDHCPSNTKVDKTVERKCCVECPPCPAPPVAGPSVFLFPPKPKDTLMISRTPEVTCVVVDVSHEDPEVQFNWYVDGVEVHNAKTKPREEQFNSTFRVVSVLTVVHQDWLNGKEYKCKVSNKGLPAPIEKTISKTKGQPREPQVYTLPPSREEMTKNQVSLTCLVKGFYPSDIAVEWESNGQPENNYKTTPPMLDSDGSFFLYSKLTVDKSRWQQGNVFSCSVMHEALHNHYTQKSLSLSP

SEQ ID NO: 758 - protein, 324 aa, Artificial Sequence
  An artificially synthesized sequence
ASTKGPSVFPLAPCSRSTSESTAALGCLVKDYFPEPVTVSWNSGALTSGVHTFPAVLQSSGLYSLSSVVTVPSSNFGTQTYTCNVDHKCSNTKVDKTVERKCCVECPPCPAPPVAGPSVFLFPPKPKDTLMISRTPEVTCVVVDVSHEDPEVQFNWYVDGVEVHNAKTKPREEQFNSTFRVVSVLTVVHQDWLNGKEYKCKVSNKGLPAPIEKTISKTKGQPREPQVYTLPPSREEMTKNQVSLTCLVKGFYPSDIAVEWESNGQPENNYKTTPPMLDSDGSFFLYSKLTVDKSRWQQGNVFSCSVMHEALHNHYTQKSLSLSP

SEQ ID NO: 759 - protein, 324 aa, Artificial Sequence
  An artificially synthesized sequence
ASTKGPSVFPLAPCSRSTSESTAALGCLVKDYFPEPVTVSWNSGALTSGVHTFPAVLQSSGLYSLSSVVTVPSSNFGTQTYTCNVDHKPCNTKVDKTVERKCCVECPPCPAPPVAGPSVFLFPPKPKDTLMISRTPEVTCVVVDVSHEDPEVQFNWYVDGVEVHNAKTKPREEQFNSTFRVVSVLTVVHQDWLNGKEYKCKVSNKGLPAPIEKTISKTKGQPREPQVYTLPPSREEMTKNQVSLTCLVKGFYPSDIAVEWESNGQPENNYKTTPPMLDSDGSFFLYSKLTVDKSRWQQGNVFSCSVMHEALHNHYTQKSLSLSP

SEQ ID NO: 760 - protein, 324 aa, Artificial Sequence
  An artificially synthesized sequence
ASTKGPSVFPLAPCSRSTSESTAALGCLVKDYFPEPVTVSWNSGALTSGVHTFPAVLQSSGLYSLSSVVTVPSSNFGTQTYTCNVDHKPSCTKVDKTVERKCCVECPPCPAPPVAGPSVFLFPPKPKDTLMISRTPEVTCVVVDVSHEDPEVQFNWYVDGVEVHNAKTKPREEQFNSTFRVVSVLTVVHQDWLNGKEYKCKVSNKGLPAPIEKTISKTKGQPREPQVYTLPPSREEMTKNQVSLTCLVKGFYPSDIAVEWESNGQPENNYKTTPPMLDSDGSFFLYSKLTVDKSRWQQGNVFSCSVMHEALHNHYTQKSLSLSP

SEQ ID NO: 761 - protein, 324 aa, Artificial Sequence
  An artificially synthesized sequence
ASTKGPSVFPLAPCSRSTSESTAALGCLVKDYFPEPVTVSWNSGALTSGVHTFPAVLQSSGLYSLSSVVTVPSSNFGTQTYTCNVDHKPSNCKVDKTVERKCCVECPPCPAPPVAGPSVFLFPPKPKDTLMISRTPEVTCVVVDVSHEDPEVQFNWYVDGVEVHNAKTKPREEQFNSTFRVVSVLTVVHQDWLNGKEYKCKVSNKGLPAPIEKTISKTKGQPREPQVYTLPPSREEMTKNQVSLTCLVKGFYPSDIAVEWESNGQPENNYKTTPPMLDSDGSFFLYSKLTVDKSRWQQGNVFSCSVMHEALHNHYTQKSLSLSP

SEQ ID NO: 762 - protein, 324 aa, Artificial Sequence
  An artificially synthesized sequence
ASTKGPSVFPLAPCSRSTSESTAALGCLVKDYFPEPVTVSWNSGALTSGVHTFPAVLQSSGLYSLSSVVTVPSSNFGTQTYTCNVDHKPSNTCVDKTVERKCCVECPPCPAPPVAGPSVFLFPPKPKDTLMISRTPEVTCVVVDVSHEDPEVQFNWYVDGVEVHNAKTKPREEQFNSTFRVVSVLTVVHQDWLNGKEYKCKVSNKGLPAPIEKTISKTKGQPREPQVYTLPPSREEMTKNQVSLTCLVKGFYPSDIAVEWESNGQPENNYKTTPPMLDSDGSFFLYSKLTVDKSRWQQGNVFSCSVMHEALHNHYTQKSLSLSP

SEQ ID NO: 763 - protein, 324 aa, Artificial Sequence
  An artificially synthesized sequence
ASTKGPSVFPLAPCSRSTSESTAALGCLVKDYFPEPVTVSWNSGALTSGVHTFPAVLQSSGLYSLSSVVTVPSSNFGTQTYTCNVDHKPSNTKCDKTVERKCCVECPPCPAPPVAGPSVFLFPPKPKDTLMISRTPEVTCVVVDVSHEDPEVQFNWYVDGVEVHNAKTKPREEQFNSTFRVVSVLTVVHQDWLNGKEYKCKVSNKGLPAPIEKTISKTKGQPREPQVYTLPPSREEMTKNQVSLTCLVKGFYPSDIAVEWESNGQPENNYKTTPPMLDSDGSFFLYSKLTVDKSRWQQGNVFSCSVMHEALHNHYTQKSLSLSP

SEQ ID NO: 764 - protein, 324 aa, Artificial Sequence
  An artificially synthesized sequence
ASTKGPSVFPLAPCSRSTSESTAALGCLVKDYFPEPVTVSWNSGALTSGVHTFPAVLQSSGLYSLSSVVTVPSSNFGTQTYTCNVDHKPSNTKVCKTVERKCCVECPPCPAPPVAGPSVFLFPPKPKDTLMISRTPEVTCVVVDVSHEDPEVQFNWYVDGVEVHNAKTKPREEQFNSTFRVVSVLTVVHQDWLNGKEYKCKVSNKGLPAPIEKTISKTKGQPREPQVYTLPPSREEMTKNQVSLTCLVKGFYPSDIAVEWESNGQPENNYKTTPPMLDSDGSFFLYSKLTVDKSRWQQGNVFSCSVMHEALHNHYTQKSLSLSP

SEQ ID NO: 765 - protein, 324 aa, Artificial Sequence
  An artificially synthesized sequence
ASTKGPSVFPLAPCSRSTSESTAALGCLVKDYFPEPVTVSWNSGALTSGVHTFPAVLQSSGLYSLSSVVTVPSSNFGTQTYTCNVDHKPSNTKVDCTVERKCCVECPPCPAPPVAGPSVFLFPPKPKDTLMISRTPEVTCVVVDVSHEDPEVQFNWYVDGVEVHNAKTKPREEQFNSTFRVVSVLTVVHQDWLNGKEYKCKVSNKGLPAPIEKTISKTKGQPREPQVYTLPPSREEMTKNQVSLTCLVKGFYPSDIAVEWESNGQPENNYKTTPPMLDSDGSFFLYSKLTVDKSRWQQGNVFSCSVMHEALHNHYTQKSLSLSP

SEQ ID NO: 766 - protein, 324 aa, Artificial Sequence
  An artificially synthesized sequence
ASTKGPSVFPLAPCSRSTSESTAALGCLVKDYFPEPVTVSWNSGALTSGVHTFPAVLQSSGLYSLSSVVTVPSSNFGTQTYTCNVDHKPSNTKVDKCVERKCCVECPPCPAPPVAGPSVFLFPPKPKDTLMISRTPEVTCVVVDVSHEDPEVQFNWYVDGVEVHNAKTKPREEQFNSTFRVVSVLTVVHQDWLNGKEYKCKVSNKGLPAPIEKTISKTKGQPREPQVYTLPPSREEMTKNQVSLTCLVKGFYPSDIAVEWESNGQPENNYKTTPPMLDSDGSFFLYSKLTVDKSRWQQGNVFSCSVMHEALHNHYTQKSLSLSP

SEQ ID NO: 767 - protein, 324 aa, Artificial Sequence
  An artificially synthesized sequence
ASTKGPSVFPLAPCSRSTSESTAALGCLVKDYFPEPVTVSWNSGALTSGVHTFPAVLQSSGLYSLSSVVTVPSSNFGTQTYTCNVDHKPSNTKVDKTCERKCCVECPPCPAPPVAGPSVFLFPPKPKDTLMISRTPEVTCVVVDVSHEDPEVQFNWYVDGVEVHNAKTKPREEQFNSTFRVVSVLTVVHQDWLNGKEYKCKVSNKGLPAPIEKTISKTKGQPREPQVYTLPPSREEMTKNQVSLTCLVKGFYPSDIAVEWESNGQPENNYKTTPPMLDSDGSFFLYSKLTVDKSRWQQGNVFSCSVMHEALHNHYTQKSLSLSP

SEQ ID NO: 768 - protein, 324 aa, Artificial Sequence
  An artificially synthesized sequence
ASTKGPSVFPLAPCSRSTSESTAALGCLVKDYFPEPVTVSWNSGALTSGVHTFPAVLQSSGLYSLSSVVTVPSSNFGTQTYTCNVDHKPSNTKVDKTVCRKCCVECPPCPAPPVAGPSVFLFPPKPKDTLMISRTPEVTCVVVDVSHEDPEVQFNWYVDGVEVHNAKTKPREEQFNSTFRVVSVLTVVHQDWLNGKEYKCKVSNKGLPAPIEKTISKTKGQPREPQVYTLPPSREEMTKNQVSLTCLVKGFYPSDIAVEWESNGQPENNYKTTPPMLDSDGSFFLYSKLTVDKSRWQQGNVFSCSVMHEALHNHYTQKSLSLSP

SEQ ID NO: 769 - protein, 324 aa, Artificial Sequence
  An artificially synthesized sequence
ASTKGPSVFPLAPCSRSTSESTAALGCLVKDYFPEPVTVSWNSGALTSGVHTFPAVLQSSGLYSLSSVVTVPSSNFGTQTYTCNVDHKPSNTKVDKTVECKCCVECPPCPAPPVAGPSVFLFPPKPKDTLMISRTPEVTCVVVDVSHEDPEVQFNWYVDGVEVHNAKTKPREEQFNSTFRVVSVLTVVHQDWLNGKEYKCKVSNKGLPAPIEKTISKTKGQPREPQVYTLPPSREEMTKNQVSLTCLVKGFYPSDIAVEWESNGQPENNYKTTPPMLDSDGSFFLYSKLTVDKSRWQQGNVFSCSVMHEALHNHYTQKSLSLSP

SEQ ID NO: 770 - protein, 324 aa, Artificial Sequence
  An artificially synthesized sequence
ASTKGPSVFPLAPCSRSTSESTAALGCLVKDYFPEPVTVSWNSGALTSGVHTFPAVLQSSGLYSLSSVVTVPSSNFGTQTYTCNVDHKPSNTKVDKTVERCCCVECPPCPAPPVAGPSVFLFPPKPKDTLMISRTPEVTCVVVDVSHEDPEVQFNWYVDGVEVHNAKTKPREEQFNSTFRVVSVLTVVHQDWLNGKEYKCKVSNKGLPAPIEKTISKTKGQPREPQVYTLPPSREEMTKNQVSLTCLVKGFYPSDIAVEWESNGQPENNYKTTPPMLDSDGSFFLYSKLTVDKSRWQQGNVFSCSVMHEALHNHYTQKSLSLSP

SEQ ID NO: 771 - protein, 110 aa, Artificial Sequence
  An artificially synthesized sequence
QSVLCQPPSASGTPGQRVTISCSGSSSNIGSNTVNWYQRLPGAAPQLLIYNNDQRPSGIPDRFSGSKSGTSGSLVISGLQSEDEADYYCASWDDSLNGRVFGGGTKLTVL

SEQ ID NO: 772 - protein, 110 aa, Artificial Sequence
  An artificially synthesized sequence
QSVLTCPPSASGTPGQRVTISCSGSSSNIGSNTVNWYQRLPGAAPQLLIYNNDQRPSGIPDRFSGSKSGTSGSLVISGLQSEDEADYYCASWDDSLNGRVFGGGTKLTVL

SEQ ID NO: 773 - protein, 110 aa, Artificial Sequence
  An artificially synthesized sequence
QSVLTQCPSASGTPGQRVTISCSGSSSNIGSNTVNWYQRLPGAAPQLLIYNNDQRPSGIPDRFSGSKSGTSGSLVISGLQSEDEADYYCASWDDSLNGRVFGGGTKLTVL

SEQ ID NO: 774 - protein, 110 aa, Artificial Sequence
  An artificially synthesized sequence
QSVLTQPCSASGTPGQRVTISCSGSSSNIGSNTVNWYQRLPGAAPQLLIYNNDQRPSGIPDRFSGSKSGTSGSLVISGLQSEDEADYYCASWDDSLNGRVFGGGTKLTVL

SEQ ID NO: 775 - protein, 110 aa, Artificial Sequence
  An artificially synthesized sequence
QSVLTQPPCASGTPGQRVTISCSGSSSNIGSNTVNWYQRLPGAAPQLLIYNNDQRPSGIPDRFSGSKSGTSGSLVISGLQSEDEADYYCASWDDSLNGRVFGGGTKLTVL

SEQ ID NO: 776 - protein, 110 aa, Artificial Sequence
  An artificially synthesized sequence
QSVLTQPPSCSGTPGQRVTISCSGSSSNIGSNTVNWYQRLPGAAPQLLIYNNDQRPSGIPDRFSGSKSGTSGSLVISGLQSEDEADYYCASWDDSLNGRVFGGGTKLTVL

SEQ ID NO: 777 - protein, 110 aa, Artificial Sequence
  An artificially synthesized sequence
QSVLTQPPSACGTPGQRVTISCSGSSSNIGSNTVNWYQRLPGAAPQLLIYNNDQRPSGIPDRFSGSKSGTSGSLVISGLQSEDEADYYCASWDDSLNGRVFGGGTKLTVL

SEQ ID NO: 778 - protein, 110 aa, Artificial Sequence
  An artificially synthesized sequence
QSVLTQPPSASCTPGQRVTISCSGSSSNIGSNTVNWYQRLPGAAPQLLIYNNDQRPSGIPDRFSGSKSGTSGSLVISGLQSEDEADYYCASWDDSLNGRVFGGGTKLTVL

SEQ ID NO: 779 - protein, 110 aa, Artificial Sequence
  An artificially synthesized sequence
QSVLTQPPSASGCPGQRVTISCSGSSSNIGSNTVNWYQRLPGAAPQLLIYNNDQRPSGIPDRFSGSKSGTSGSLVISGLQSEDEADYYCASWDDSLNGRVFGGGTKLTVL

SEQ ID NO: 780 - protein, 110 aa, Artificial Sequence
  An artificially synthesized sequence
QSVLTQPPSASGTCGQRVTISCSGSSSNIGSNTVNWYQRLPGAAPQLLIYNNDQRPSGIPDRFSGSKSGTSGSLVISGLQSEDEADYYCASWDDSLNGRVFGGGTKLTVL

SEQ ID NO: 781 - protein, 110 aa, Artificial Sequence
  An artificially synthesized sequence
QSVLTQPPSASGTPCQRVTISCSGSSSNIGSNTVNWYQRLPGAAPQLLIYNNDQRPSGIPDRFSGSKSGTSGSLVISGLQSEDEADYYCASWDDSLNGRVFGGGTKLTVL

SEQ ID NO: 782 - protein, 110 aa, Artificial Sequence
  An artificially synthesized sequence
QSVLTQPPSASGTPGCRVTISCSGSSSNIGSNTVNWYQRLPGAAPQLLIYNNDQRPSGIPDRFSGSKSGTSGSLVISGLQSEDEADYYCASWDDSLNGRVFGGGTKLTVL

SEQ ID NO: 783 - protein, 110 aa, Artificial Sequence
  An artificially synthesized sequence
QSVLTQPPSASGTPGQCVTISCSGSSSNIGSNTVNWYQRLPGAAPQLLIYNNDQRPSGIPDRFSGSKSGTSGSLVISGLQSEDEADYYCASWDDSLNGRVFGGGTKLTVL

SEQ ID NO: 784 - protein, 110 aa, Artificial Sequence
  An artificially synthesized sequence
QSVLTQPPSASGTPGQRCTISCSGSSSNIGSNTVNWYQRLPGAAPQLLIYNNDQRPSGIPDRFSGSKSGTSGSLVISGLQSEDEADYYCASWDDSLNGRVFGGGTKLTVL

SEQ ID NO: 785 - protein, 110 aa, Artificial Sequence
  An artificially synthesized sequence
QSVLTQPPSASGTPGQRVCISCSGSSSNIGSNTVNWYQRLPGAAPQLLIYNNDQRPSGIPDRFSGSKSGTSGSLVISGLQSEDEADYYCASWDDSLNGRVFGGGTKLTVL

SEQ ID NO: 786 - protein, 110 aa, Artificial Sequence
  An artificially synthesized sequence
QSVLTQPPSASGTPGQRVTCSCSGSSSNIGSNTVNWYQRLPGAAPQLLIYNNDQRPSGIPDRFSGSKSGTSGSLVISGLQSEDEADYYCASWDDSLNGRVFGGGTKLTVL

SEQ ID NO: 787 - protein, 110 aa, Artificial Sequence
  An artificially synthesized sequence
QSVLTQPPSASGTPGQRVTICCSGSSSNIGSNTVNWYQRLPGAAPQLLIYNNDQRPSGIPDRFSGSKSGTSGSLVISGLQSEDEADYYCASWDDSLNGRVFGGGTKLTVL

SEQ ID NO: 788 - protein, 110 aa, Artificial Sequence
  An artificially synthesized sequence
QSVLTQPPSASGTPGQRVTISCSCSSSNIGSNTVNWYQRLPGAAPQLLIYNNDQRPSGIPDRFSGSKSGTSGSLVISGLQSEDEADYYCASWDDSLNGRVFGGGTKLTVL

SEQ ID NO: 789 - protein, 110 aa, Artificial Sequence
  An artificially synthesized sequence
QSVLTQPPSASGTPGQRVTISCSGCSSNIGSNTVNWYQRLPGAAPQLLIYNNDQRPSGIPDRFSGSKSGTSGSLVISGLQSEDEADYYCASWDDSLNGRVFGGGTKLTVL

SEQ ID NO: 790 - protein, 110 aa, Artificial Sequence
  An artificially synthesized sequence
QSVLTQPPSASGTPGQRVTISCSGSCSNIGSNTVNWYQRLPGAAPQLLIYNNDQRPSGIPDRFSGSKSGTSGSLVISGLQSEDEADYYCASWDDSLNGRVFGGGTKLTVL

SEQ ID NO: 791 - protein, 110 aa, Artificial Sequence
  An artificially synthesized sequence
QSVLTQPPSASGTPGQRVTISCSGSSCNIGSNTVNWYQRLPGAAPQLLIYNNDQRPSGIPDRFSGSKSGTSGSLVISGLQSEDEADYYCASWDDSLNGRVFGGGTKLTVL

SEQ ID NO: 792 - protein, 110 aa, Artificial Sequence
  An artificially synthesized sequence
QSVLTQPPSASGTPGQRVTISCSGSSSNIGSNCVNWYQRLPGAAPQLLIYNNDQRPSGIPDRFSGSKSGTSGSLVISGLQSEDEADYYCASWDDSLNGRVFGGGTKLTVL

SEQ ID NO: 793 - protein, 110 aa, Artificial Sequence
  An artificially synthesized sequence
QSVLTQPPSASGTPGQRVTISCSGSSSNIGSNTCNWYQRLPGAAPQLLIYNNDQRPSGIPDRFSGSKSGTSGSLVISGLQSEDEADYYCASWDDSLNGRVFGGGTKLTVL

SEQ ID NO: 794 - protein, 110 aa, Artificial Sequence
  An artificially synthesized sequence
QSVLTQPPSASGTPGQRVTISCSGSSSNIGSNTVCWYQRLPGAAPQLLIYNNDQRPSGIPDRFSGSKSGTSGSLVISGLQSEDEADYYCASWDDSLNGRVFGGGTKLTVL

SEQ ID NO: 795 - protein, 110 aa, Artificial Sequence
  An artificially synthesized sequence
QSVLTQPPSASGTPGQRVTISCSGSSSNIGSNTVNWYQRLPGAAPQLLIYCNDQRPSGIPDRFSGSKSGTSGSLVISGLQSEDEADYYCASWDDSLNGRVFGGGTKLTVL

SEQ ID NO: 796 - protein, 110 aa, Artificial Sequence
  An artificially synthesized sequence
QSVLTQPPSASGTPGQRVTISCSGSSSNIGSNTVNWYQRLPGAAPQLLIYNCDQRPSGIPDRFSGSKSGTSGSLVISGLQSEDEADYYCASWDDSLNGRVFGGGTKLTVL

SEQ ID NO: 797 - protein, 110 aa, Artificial Sequence
  An artificially synthesized sequence
QSVLTQPPSASGTPGQRVTISCSGSSSNIGSNTVNWYQRLPGAAPQLLIYNNDQRCSGIPDRFSGSKSGTSGSLVISGLQSEDEADYYCASWDDSLNGRVFGGGTKLTVL

SEQ ID NO: 798 - protein, 110 aa, Artificial Sequence
  An artificially synthesized sequence
QSVLTQPPSASGTPGQRVTISCSGSSSNIGSNTVNWYQRLPGAAPQLLIYNNDQRPCGIPDRFSGSKSGTSGSLVISGLQSEDEADYYCASWDDSLNGRVFGGGTKLTVL

SEQ ID NO: 799 - protein, 110 aa, Artificial Sequence
  An artificially synthesized sequence
QSVLTQPPSASGTPGQRVTISCSGSSSNIGSNTVNWYQRLPGAAPQLLIYNNDQRPSCIPDRFSGSKSGTSGSLVISGLQSEDEADYYCASWDDSLNGRVFGGGTKLTVL

SEQ ID NO: 800 - protein, 110 aa, Artificial Sequence
  An artificially synthesized sequence
QSVLTQPPSASGTPGQRVTISCSGSSSNIGSNTVNWYQRLPGAAPQLLIYNNDQRPSGCPDRFSGSKSGTSGSLVISGLQSEDEADYYCASWDDSLNGRVFGGGTKLTVL

SEQ ID NO: 801 - protein, 110 aa, Artificial Sequence
  An artificially synthesized sequence
QSVLTQPPSASGTPGQRVTISCSGSSSNIGSNTVNWYQRLPGAAPQLLIYNNDQRPSGICDRFSGSKSGTSGSLVISGLQSEDEADYYCASWDDSLNGRVFGGGTKLTVL

SEQ ID NO: 802 - protein, 110 aa, Artificial Sequence
  An artificially synthesized sequence
QSVLTQPPSASGTPGQRVTISCSGSSSNIGSNTVNWYQRLPGAAPQLLIYNNDQRPSGIPCRFSGSKSGTSGSLVISGLQSEDEADYYCASWDDSLNGRVFGGGTKLTVL

SEQ ID NO: 803 - protein, 110 aa, Artificial Sequence
  An artificially synthesized sequence
QSVLTQPPSASGTPGQRVTISCSGSSSNIGSNTVNWYQRLPGAAPQLLIYNNDQRPSGIPDCFSGSKSGTSGSLVISGLQSEDEADYYCASWDDSLNGRVFGGGTKLTVL

SEQ ID NO: 804 - protein, 110 aa, Artificial Sequence
  An artificially synthesized sequence
QSVLTQPPSASGTPGQRVTISCSGSSSNIGSNTVNWYQRLPGAAPQLLIYNNDQRPSGIPDRCSGSKSGTSGSLVISGLQSEDEADYYCASWDDSLNGRVFGGGTKLTVL

SEQ ID NO: 805 - protein, 110 aa, Artificial Sequence
  An artificially synthesized sequence
QSVLTQPPSASGTPGQRVTISCSGSSSNIGSNTVNWYQRLPGAAPQLLIYNNDQRPSGIPDRFCGSKSGTSGSLVISGLQSEDEADYYCASWDDSLNGRVFGGGTKLTVL

SEQ ID NO: 806 - protein, 110 aa, Artificial Sequence
  An artificially synthesized sequence
QSVLTQPPSASGTPGQRVTISCSGSSSNIGSNTVNWYQRLPGAAPQLLIYNNDQRPSGIPDRFSGCKSGTSGSLVISGLQSEDEADYYCASWDDSLNGRVFGGGTKLTVL

SEQ ID NO: 807 - protein, 110 aa, Artificial Sequence
  An artificially synthesized sequence
QSVLTQPPSASGTPGQRVTISCSGSSSNIGSNTVNWYQRLPGAAPQLLIYNNDQRPSGIPDRFSGSKCGTSGSLVISGLQSEDEADYYCASWDDSLNGRVFGGGTKLTVL

SEQ ID NO: 808 - protein, 110 aa, Artificial Sequence
  An artificially synthesized sequence
QSVLTQPPSASGTPGQRVTISCSGSSSNIGSNTVNWYQRLPGAAPQLLIYNNDQRPSGIPDRFSGSKSCTSGSLVISGLQSEDEADYYCASWDDSLNGRVFGGGTKLTVL

SEQ ID NO: 809 - protein, 110 aa, Artificial Sequence
  An artificially synthesized sequence
QSVLTQPPSASGTPGQRVTISCSGSSSNIGSNTVNWYQRLPGAAPQLLIYNNDQRPSGIPDRFSGSKSGCSGSLVISGLQSEDEADYYCASWDDSLNGRVFGGGTKLTVL

SEQ ID NO: 810 - protein, 110 aa, Artificial Sequence
  An artificially synthesized sequence
QSVLTQPPSASGTPGQRVTISCSGSSSNIGSNTVNWYQRLPGAAPQLLIYNNDQRPSGIPDRFSGSKSGTCGSLVISGLQSEDEADYYCASWDDSLNGRVFGGGTKLTVL

SEQ ID NO: 811 - protein, 110 aa, Artificial Sequence
  An artificially synthesized sequence
QSVLTQPPSASGTPGQRVTISCSGSSSNIGSNTVNWYQRLPGAAPQLLIYNNDQRPSGIPDRFSGSKSGTSGCLVISGLQSEDEADYYCASWDDSLNGRVFGGGTKLTVL

SEQ ID NO: 812 - protein, 110 aa, Artificial Sequence
  An artificially synthesized sequence
QSVLTQPPSASGTPGQRVTISCSGSSSNIGSNTVNWYQRLPGAAPQLLIYNNDQRPSGIPDRFSGSKSGTSGSCVISGLQSEDEADYYCASWDDSLNGRVFGGGTKLTVL

SEQ ID NO: 813 - protein, 110 aa, Artificial Sequence
  An artificially synthesized sequence
QSVLTQPPSASGTPGQRVTISCSGSSSNIGSNTVNWYQRLPGAAPQLLIYNNDQRPSGIPDRFSGSKSGTSGSLCISGLQSEDEADYYCASWDDSLNGRVFGGGTKLTVL

SEQ ID NO: 814 - protein, 110 aa, Artificial Sequence
  An artificially synthesized sequence
QSVLTQPPSASGTPGQRVTISCSGSSSNIGSNTVNWYQRLPGAAPQLLIYNNDQRPSGIPDRFSGSKSGTSGSLVCSGLQSEDEADYYCASWDDSLNGRVFGGGTKLTVL

SEQ ID NO: 815 - protein, 110 aa, Artificial Sequence
  An artificially synthesized sequence
QSVLTQPPSASGTPGQRVTISCSGSSSNIGSNTVNWYQRLPGAAPQLLIYNNDQRPSGIPDRFSGSKSGTSGSLVICGLQSEDEADYYCASWDDSLNGRVFGGGTKLTVL

SEQ ID NO: 816 - protein, 110 aa, Artificial Sequence
  An artificially synthesized sequence
QSVLTQPPSASGTPGQRVTISCSGSSSNIGSNTVNWYQRLPGAAPQLLIYNNDQRPSGIPDRFSGSKSGTSGSLVISCLQSEDEADYYCASWDDSLNGRVFGGGTKLTVL

SEQ ID NO: 817 - protein, 110 aa, Artificial Sequence
  An artificially synthesized sequence
QSVLTQPPSASGTPGQRVTISCSGSSSNIGSNTVNWYQRLPGAAPQLLIYNNDQRPSGIPDRFSGSKSGTSGSLVISGCQSEDEADYYCASWDDSLNGRVFGGGTKLTVL

SEQ ID NO: 818 - protein, 110 aa, Artificial Sequence
  An artificially synthesized sequence
QSVLTQPPSASGTPGQRVTISCSGSSSNIGSNTVNWYQRLPGAAPQLLIYNNDQRPSGIPDRFSGSKSGTSGSLVISGLCSEDEADYYCASWDDSLNGRVFGGGTKLTVL

SEQ ID NO: 819 - protein, 110 aa, Artificial Sequence
  An artificially synthesized sequence
QSVLTQPPSASGTPGQRVTISCSGSSSNIGSNTVNWYQRLPGAAPQLLIYNNDQRPSGIPDRFSGSKSGTSGSLVISGLQSEDEADYYCASWDDSLNGCVFGGGTKLTVL

SEQ ID NO: 820 - protein, 110 aa, Artificial Sequence
  An artificially synthesized sequence
QSVLTQPPSASGTPGQRVTISCSGSSSNIGSNTVNWYQRLPGAAPQLLIYNNDQRPSGIPDRFSGSKSGTSGSLVISGLQSEDEADYYCASWDDSLNGRCFGGGTKLTVL

SEQ ID NO: 821 - protein, 110 aa, Artificial Sequence
  An artificially synthesized sequence
QSVLTQPPSASGTPGQRVTISCSGSSSNIGSNTVNWYQRLPGAAPQLLIYNNDQRPSGIPDRFSGSKSGTSGSLVISGLQSEDEADYYCASWDDSLNGRVCGGGTKLTVL

SEQ ID NO: 822 - protein, 110 aa, Artificial Sequence
  An artificially synthesized sequence
QSVLTQPPSASGTPGQRVTISCSGSSSNIGSNTVNWYQRLPGAAPQLLIYNNDQRPSGIPDRFSGSKSGTSGSLVISGLQSEDEADYYCASWDDSLNGRVFCGGTKLTVL

SEQ ID NO: 823 - protein, 110 aa, Artificial Sequence
  An artificially synthesized sequence
QSVLTQPPSASGTPGQRVTISCSGSSSNIGSNTVNWYQRLPGAAPQLLIYNNDQRPSGIPDRFSGSKSGTSGSLVISGLQSEDEADYYCASWDDSLNGRVFGCGTKLTVL

SEQ ID NO: 824 - protein, 110 aa, Artificial Sequence
  An artificially synthesized sequence
QSVLTQPPSASGTPGQRVTISCSGSSSNIGSNTVNWYQRLPGAAPQLLIYNNDQRPSGIPDRFSGSKSGTSGSLVISGLQSEDEADYYCASWDDSLNGRVFGGCTKLTVL

SEQ ID NO: 825 - protein, 110 aa, Artificial Sequence
  An artificially synthesized sequence
QSVLTQPPSASGTPGQRVTISCSGSSSNIGSNTVNWYQRLPGAAPQLLIYNNDQRPSGIPDRFSGSKSGTSGSLVISGLQSEDEADYYCASWDDSLNGRVFGGGCKLTVL

SEQ ID NO: 826 - protein, 110 aa, Artificial Sequence
  An artificially synthesized sequence
QSVLTQPPSASGTPGQRVTISCSGSSSNIGSNTVNWYQRLPGAAPQLLIYNNDQRPSGIPDRFSGSKSGTSGSLVISGLQSEDEADYYCASWDDSLNGRVFGGGTCLTVL

SEQ ID NO: 827 - protein, 110 aa, Artificial Sequence
  An artificially synthesized sequence
QSVLTQPPSASGTPGQRVTISCSGSSSNIGSNTVNWYQRLPGAAPQLLIYNNDQRPSGIPDRFSGSKSGTSGSLVISGLQSEDEADYYCASWDDSLNGRVFGGGTKCTVL

SEQ ID NO: 828 - protein, 110 aa, Artificial Sequence
  An artificially synthesized sequence
QSVLTQPPSASGTPGQRVTISCSGSSSNIGSNTVNWYQRLPGAAPQLLIYNNDQRPSGIPDRFSGSKSGTSGSLVISGLQSEDEADYYCASWDDSLNGRVFGGGTKLCVL

SEQ ID NO: 829 - protein, 110 aa, Artificial Sequence
  An artificially synthesized sequence
QSVLTQPPSASGTPGQRVTISCSGSSSNIGSNTVNWYQRLPGAAPQLLIYNNDQRPSGIPDRFSGSKSGTSGSLVISGLQSEDEADYYCASWDDSLNGRVFGGGTKLTCL

SEQ ID NO: 830 - protein, 110 aa, Artificial Sequence
  An artificially synthesized sequence
QSVLTQPPSASGTPGQRVTISCSGSSSNIGSNTVNWYQRLPGAAPQLLIYNNDQRPSGIPDRFSGSKSGTSGSLVISGLQSEDEADYYCASWDDSLNGRVFGGGTKLTVC

SEQ ID NO: 831 - protein, 106 aa, Artificial Sequence
  An artificially synthesized sequence
GCPKAAPSVTLFPPSSEELQANKATLVCLISDFYPGAVTVAWKADSSPVKAGVETTTPSKQSNNKYAASSYLSLTPEQWKSHRSYSCQVTHEGSTVEKTVAPTECS

SEQ ID NO: 832 - protein, 106 aa, Artificial Sequence
  An artificially synthesized sequence
GQCKAAPSVTLFPPSSEELQANKATLVCLISDFYPGAVTVAWKADSSPVKAGVETTTPSKQSNNKYAASSYLSLTPEQWKSHRSYSCQVTHEGSTVEKTVAPTECS

SEQ ID NO: 833 - protein, 106 aa, Artificial Sequence
  An artificially synthesized sequence
GQPCAAPSVTLFPPSSEELQANKATLVCLISDFYPGAVTVAWKADSSPVKAGVETTTPSKQSNNKYAASSYLSLTPEQWKSHRSYSCQVTHEGSTVEKTVAPTECS

SEQ ID NO: 834 - protein, 106 aa, Artificial Sequence
  An artificially synthesized sequence
GQPKCAPSVTLFPPSSEELQANKATLVCLISDFYPGAVTVAWKADSSPVKAGVETTTPSKQSNNKYAASSYLSLTPEQWKSHRSYSCQVTHEGSTVEKTVAPTECS

SEQ ID NO: 835 - protein, 106 aa, Artificial Sequence
  An artificially synthesized sequence
GQPKACPSVTLFPPSSEELQANKATLVCLISDFYPGAVTVAWKADSSPVKAGVETTTPSKQSNNKYAASSYLSLTPEQWKSHRSYSCQVTHEGSTVEKTVAPTECS

SEQ ID NO: 836 - protein, 106 aa, Artificial Sequence
  An artificially synthesized sequence
GQPKAACSVTLFPPSSEELQANKATLVCLISDFYPGAVTVAWKADSSPVKAGVETTTPSKQSNNKYAASSYLSLTPEQWKSHRSYSCQVTHEGSTVEKTVAPTECS

SEQ ID NO: 837 - protein, 106 aa, Artificial Sequence
  An artificially synthesized sequence
GQPKAAPCVTLFPPSSEELQANKATLVCLISDFYPGAVTVAWKADSSPVKAGVETTTPSKQSNNKYAASSYLSLTPEQWKSHRSYSCQVTHEGSTVEKTVAPTECS

SEQ ID NO: 838 - protein, 106 aa, Artificial Sequence
  An artificially synthesized sequence
GQPKAAPSCTLFPPSSEELQANKATLVCLISDFYPGAVTVAWKADSSPVKAGVETTTPSKQSNNKYAASSYLSLTPEQWKSHRSYSCQVTHEGSTVEKTVAPTECS

SEQ ID NO: 839 - protein, 106 aa, Artificial Sequence
  An artificially synthesized sequence
GQPKAAPSVCLFPPSSEELQANKATLVCLISDFYPGAVTVAWKADSSPVKAGVETTTPSKQSNNKYAASSYLSLTPEQWKSHRSYSCQVTHEGSTVEKTVAPTECS

SEQ ID NO: 840 - protein, 106 aa, Artificial Sequence
  An artificially synthesized sequence
GQPKAAPSVTLFPCSSEELQANKATLVCLISDFYPGAVTVAWKADSSPVKAGVETTTPSKQSNNKYAASSYLSLTPEQWKSHRSYSCQVTHEGSTVEKTVAPTECS

SEQ ID NO: 841 - protein, 106 aa, Artificial Sequence
  An artificially synthesized sequence
GQPKAAPSVTLFPPCSEELQANKATLVCLISDFYPGAVTVAWKADSSPVKAGVETTTPSKQSNNKYAASSYLSLTPEQWKSHRSYSCQVTHEGSTVEKTVAPTECS

SEQ ID NO: 842 - protein, 106 aa, Artificial Sequence
  An artificially synthesized sequence
GQPKAAPSVTLFPPSCEELQANKATLVCLISDFYPGAVTVAWKADSSPVKAGVETTTPSKQSNNKYAASSYLSLTPEQWKSHRSYSCQVTHEGSTVEKTVAPTECS

SEQ ID NO: 843 - protein, 106 aa, Artificial Sequence
  An artificially synthesized sequence
GQPKAAPSVTLFPPSSCELQANKATLVCLISDFYPGAVTVAWKADSSPVKAGVETTTPSKQSNNKYAASSYLSLTPEQWKSHRSYSCQVTHEGSTVEKTVAPTECS

SEQ ID NO: 844 - protein, 106 aa, Artificial Sequence
  An artificially synthesized sequence
GQPKAAPSVTLFPPSSECLQANKATLVCLISDFYPGAVTVAWKADSSPVKAGVETTTPSKQSNNKYAASSYLSLTPEQWKSHRSYSCQVTHEGSTVEKTVAPTECS

SEQ ID NO: 845 - protein, 106 aa, Artificial Sequence
  An artificially synthesized sequence
GQPKAAPSVTLFPPSSEECQANKATLVCLISDFYPGAVTVAWKADSSPVKAGVETTTPSKQSNNKYAASSYLSLTPEQWKSHRSYSCQVTHEGSTVEKTVAPTECS

SEQ ID NO: 846 - protein, 106 aa, Artificial Sequence
  An artificially synthesized sequence
GQPKAAPSVTLFPPSSEELCANKATLVCLISDFYPGAVTVAWKADSSPVKAGVETTTPSKQSNNKYAASSYLSLTPEQWKSHRSYSCQVTHEGSTVEKTVAPTECS

SEQ ID NO: 847 - protein, 106 aa, Artificial Sequence
  An artificially synthesized sequence
GQPKAAPSVTLFPPSSEELQCNKATLVCLISDFYPGAVTVAWKADSSPVKAGVETTTPSKQSNNKYAASSYLSLTPEQWKSHRSYSCQVTHEGSTVEKTVAPTECS

SEQ ID NO: 848 - protein, 106 aa, Artificial Sequence
  An artificially synthesized sequence
GQPKAAPSVTLFPPSSEELQACKATLVCLISDFYPGAVTVAWKADSSPVKAGVETTTPSKQSNNKYAASSYLSLTPEQWKSHRSYSCQVTHEGSTVEKTVAPTECS

SEQ ID NO: 849 - protein, 106 aa, Artificial Sequence
  An artificially synthesized sequence
GQPKAAPSVTLFPPSSEELQANCATLVCLISDFYPGAVTVAWKADSSPVKAGVETTTPSKQSNNKYAASSYLSLTPEQWKSHRSYSCQVTHEGSTVEKTVAPTECS

SEQ ID NO: 850 - protein, 106 aa, Artificial Sequence
  An artificially synthesized sequence
GQPKAAPSVTLFPPSSEELQANKCTLVCLISDFYPGAVTVAWKADSSPVKAGVETTTPSKQSNNKYAASSYLSLTPEQWKSHRSYSCQVTHEGSTVEKTVAPTECS

SEQ ID NO: 851 - protein, 106 aa, Artificial Sequence
  An artificially synthesized sequence
GQPKAAPSVTLFPPSSEELQANKACLVCLISDFYPGAVTVAWKADSSPVKAGVETTTPSKQSNNKYAASSYLSLTPEQWKSHRSYSCQVTHEGSTVEKTVAPTECS

SEQ ID NO: 852 - protein, 106 aa, Artificial Sequence
  An artificially synthesized sequence
GQPKAAPSVTLFPPSSEELQANKATLVCLCSDFYPGAVTVAWKADSSPVKAGVETTTPSKQSNNKYAASSYLSLTPEQWKSHRSYSCQVTHEGSTVEKTVAPTECS

SEQ ID NO: 853 - protein, 106 aa, Artificial Sequence
  An artificially synthesized sequence
GQPKAAPSVTLFPPSSEELQANKATLVCLICDFYPGAVTVAWKADSSPVKAGVETTTPSKQSNNKYAASSYLSLTPEQWKSHRSYSCQVTHEGSTVEKTVAPTECS

SEQ ID NO: 854 - protein, 106 aa, Artificial Sequence
  An artificially synthesized sequence
GQPKAAPSVTLFPPSSEELQANKATLVCLISCFYPGAVTVAWKADSSPVKAGVETTTPSKQSNNKYAASSYLSLTPEQWKSHRSYSCQVTHEGSTVEKTVAPTECS

SEQ ID NO: 855 - protein, 106 aa, Artificial Sequence
  An artificially synthesized sequence
GQPKAAPSVTLFPPSSEELQANKATLVCLISDCYPGAVTVAWKADSSPVKAGVETTTPSKQSNNKYAASSYLSLTPEQWKSHRSYSCQVTHEGSTVEKTVAPTECS

SEQ ID NO: 856 - protein, 106 aa, Artificial Sequence
  An artificially synthesized sequence
GQPKAAPSVTLFPPSSEELQANKATLVCLISDFCPGAVTVAWKADSSPVKAGVETTTPSKQSNNKYAASSYLSLTPEQWKSHRSYSCQVTHEGSTVEKTVAPTECS

SEQ ID NO: 857 - protein, 106 aa, Artificial Sequence
  An artificially synthesized sequence
GQPKAAPSVTLFPPSSEELQANKATLVCLISDFYCGAVTVAWKADSSPVKAGVETTTPSKQSNNKYAASSYLSLTPEQWKSHRSYSCQVTHEGSTVEKTVAPTECS

SEQ ID NO: 858 - protein, 106 aa, Artificial Sequence
  An artificially synthesized sequence
GQPKAAPSVTLFPPSSEELQANKATLVCLISDFYPCAVTVAWKADSSPVKAGVETTTPSKQSNNKYAASSYLSLTPEQWKSHRSYSCQVTHEGSTVEKTVAPTECS

SEQ ID NO: 859 - protein, 106 aa, Artificial Sequence
  An artificially synthesized sequence
GQPKAAPSVTLFPPSSEELQANKATLVCLISDFYPGCVTVAWKADSSPVKAGVETTTPSKQSNNKYAASSYLSLTPEQWKSHRSYSCQVTHEGSTVEKTVAPTECS

SEQ ID NO: 860 - protein, 106 aa, Artificial Sequence
  An artificially synthesized sequence
GQPKAAPSVTLFPPSSEELQANKATLVCLISDFYPGACTVAWKADSSPVKAGVETTTPSKQSNNKYAASSYLSLTPEQWKSHRSYSCQVTHEGSTVEKTVAPTECS

SEQ ID NO: 861 - protein, 106 aa, Artificial Sequence
  An artificially synthesized sequence
GQPKAAPSVTLFPPSSEELQANKATLVCLISDFYPGAVCVAWKADSSPVKAGVETTTPSKQSNNKYAASSYLSLTPEQWKSHRSYSCQVTHEGSTVEKTVAPTECS

SEQ ID NO: 862 - protein, 106 aa, Artificial Sequence
  An artificially synthesized sequence
GQPKAAPSVTLFPPSSEELQANKATLVCLISDFYPGAVTCAWKADSSPVKAGVETTTPSKQSNNKYAASSYLSLTPEQWKSHRSYSCQVTHEGSTVEKTVAPTECS

SEQ ID NO: 863 - protein, 106 aa, Artificial Sequence
  An artificially synthesized sequence
GQPKAAPSVTLFPPSSEELQANKATLVCLISDFYPGAVTVCWKADSSPVKAGVETTTPSKQSNNKYAASSYLSLTPEQWKSHRSYSCQVTHEGSTVEKTVAPTECS

SEQ ID NO: 864 - protein, 106 aa, Artificial Sequence
  An artificially synthesized sequence
GQPKAAPSVTLFPPSSEELQANKATLVCLISDFYPGAVTVACKADSSPVKAGVETTTPSKQSNNKYAASSYLSLTPEQWKSHRSYSCQVTHEGSTVEKTVAPTECS

SEQ ID NO: 865 - protein, 106 aa, Artificial Sequence
  An artificially synthesized sequence
GQPKAAPSVTLFPPSSEELQANKATLVCLISDFYPGAVTVAWCADSSPVKAGVETTTPSKQSNNKYAASSYLSLTPEQWKSHRSYSCQVTHEGSTVEKTVAPTECS

SEQ ID NO: 866 - protein, 106 aa, Artificial Sequence
  An artificially synthesized sequence
GQPKAAPSVTLFPPSSEELQANKATLVCLISDFYPGAVTVAWKCDSSPVKAGVETTTPSKQSNNKYAASSYLSLTPEQWKSHRSYSCQVTHEGSTVEKTVAPTECS

SEQ ID NO: 867 - protein, 106 aa, Artificial Sequence
  An artificially synthesized sequence
GQPKAAPSVTLFPPSSEELQANKATLVCLISDFYPGAVTVAWKACSSPVKAGVETTTPSKQSNNKYAASSYLSLTPEQWKSHRSYSCQVTHEGSTVEKTVAPTECS

SEQ ID NO: 868 - protein, 106 aa, Artificial Sequence
  An artificially synthesized sequence
GQPKAAPSVTLFPPSSEELQANKATLVCLISDFYPGAVTVAWKADCSPVKAGVETTTPSKQSNNKYAASSYLSLTPEQWKSHRSYSCQVTHEGSTVEKTVAPTECS

SEQ ID NO: 869 - protein, 106 aa, Artificial Sequence
  An artificially synthesized sequence
GQPKAAPSVTLFPPSSEELQANKATLVCLISDFYPGAVTVAWKADSCPVKAGVETTTPSKQSNNKYAASSYLSLTPEQWKSHRSYSCQVTHEGSTVEKTVAPTECS

SEQ ID NO: 870 - protein, 106 aa, Artificial Sequence
  An artificially synthesized sequence
GQPKAAPSVTLFPPSSEELQANKATLVCLISDFYPGAVTVAWKADSSCVKAGVETTTPSKQSNNKYAASSYLSLTPEQWKSHRSYSCQVTHEGSTVEKTVAPTECS

SEQ ID NO: 871 - protein, 106 aa, Artificial Sequence
  An artificially synthesized sequence
GQPKAAPSVTLFPPSSEELQANKATLVCLISDFYPGAVTVAWKADSSPCKAGVETTTPSKQSNNKYAASSYLSLTPEQWKSHRSYSCQVTHEGSTVEKTVAPTECS

SEQ ID NO: 872 - protein, 106 aa, Artificial Sequence
  An artificially synthesized sequence
GQPKAAPSVTLFPPSSEELQANKATLVCLISDFYPGAVTVAWKADSSPVCAGVETTTPSKQSNNKYAASSYLSLTPEQWKSHRSYSCQVTHEGSTVEKTVAPTECS

SEQ ID NO: 873 - protein, 106 aa, Artificial Sequence
  An artificially synthesized sequence
GQPKAAPSVTLFPPSSEELQANKATLVCLISDFYPGAVTVAWKADSSPVKCGVETTTPSKQSNNKYAASSYLSLTPEQWKSHRSYSCQVTHEGSTVEKTVAPTECS

SEQ ID NO: 874 - protein, 106 aa, Artificial Sequence
  An artificially synthesized sequence
GQPKAAPSVTLFPPSSEELQANKATLVCLISDFYPGAVTVAWKADSSPVKACVETTTPSKQSNNKYAASSYLSLTPEQWKSHRSYSCQVTHEGSTVEKTVAPTECS

SEQ ID NO: 875 - protein, 106 aa, Artificial Sequence
  An artificially synthesized sequence
GQPKAAPSVTLFPPSSEELQANKATLVCLISDFYPGAVTVAWKADSSPVKAGCETTTPSKQSNNKYAASSYLSLTPEQWKSHRSYSCQVTHEGSTVEKTVAPTECS

SEQ ID NO: 876 - protein, 106 aa, Artificial Sequence
  An artificially synthesized sequence
GQPKAAPSVTLFPPSSEELQANKATLVCLISDFYPGAVTVAWKADSSPVKAGVCTTTPSKQSNNKYAASSYLSLTPEQWKSHRSYSCQVTHEGSTVEKTVAPTECS

SEQ ID NO: 877 - protein, 106 aa, Artificial Sequence
  An artificially synthesized sequence
GQPKAAPSVTLFPPSSEELQANKATLVCLISDFYPGAVTVAWKADSSPVKAGVECTTPSKQSNNKYAASSYLSLTPEQWKSHRSYSCQVTHEGSTVEKTVAPTECS

SEQ ID NO: 878 - protein, 106 aa, Artificial Sequence
  An artificially synthesized sequence
GQPKAAPSVTLFPPSSEELQANKATLVCLISDFYPGAVTVAWKADSSPVKAGVETCTPSKQSNNKYAASSYLSLTPEQWKSHRSYSCQVTHEGSTVEKTVAPTECS

SEQ ID NO: 879 - protein, 106 aa, Artificial Sequence
  An artificially synthesized sequence
GQPKAAPSVTLFPPSSEELQANKATLVCLISDFYPGAVTVAWKADSSPVKAGVETTCPSKQSNNKYAASSYLSLTPEQWKSHRSYSCQVTHEGSTVEKTVAPTECS

SEQ ID NO: 880 - protein, 106 aa, Artificial Sequence
  An artificially synthesized sequence
GQPKAAPSVTLFPPSSEELQANKATLVCLISDFYPGAVTVAWKADSSPVKAGVETTTCSKQSNNKYAASSYLSLTPEQWKSHRSYSCQVTHEGSTVEKTVAPTECS

SEQ ID NO: 881 - protein, 106 aa, Artificial Sequence
  An artificially synthesized sequence
GQPKAAPSVTLFPPSSEELQANKATLVCLISDFYPGAVTVAWKADSSPVKAGVETTTPCKQSNNKYAASSYLSLTPEQWKSHRSYSCQVTHEGSTVEKTVAPTECS

SEQ ID NO: 882 - protein, 106 aa, Artificial Sequence
  An artificially synthesized sequence
GQPKAAPSVTLFPPSSEELQANKATLVCLISDFYPGAVTVAWKADSSPVKAGVETTTPSCQSNNKYAASSYLSLTPEQWKSHRSYSCQVTHEGSTVEKTVAPTECS

SEQ ID NO: 883 - protein, 106 aa, Artificial Sequence
  An artificially synthesized sequence
GQPKAAPSVTLFPPSSEELQANKATLVCLISDFYPGAVTVAWKADSSPVKAGVETTTPSKCSNNKYAASSYLSLTPEQWKSHRSYSCQVTHEGSTVEKTVAPTECS

SEQ ID NO: 884 - protein, 106 aa, Artificial Sequence
  An artificially synthesized sequence
GQPKAAPSVTLFPPSSEELQANKATLVCLISDFYPGAVTVAWKADSSPVKAGVETTTPSKQCNNKYAASSYLSLTPEQWKSHRSYSCQVTHEGSTVEKTVAPTECS

SEQ ID NO: 885 - protein, 106 aa, Artificial Sequence
  An artificially synthesized sequence
GQPKAAPSVTLFPPSSEELQANKATLVCLISDFYPGAVTVAWKADSSPVKAGVETTTPSKQSCNKYAASSYLSLTPEQWKSHRSYSCQVTHEGSTVEKTVAPTECS

SEQ ID NO: 886 - protein, 106 aa, Artificial Sequence
  An artificially synthesized sequence
GQPKAAPSVTLFPPSSEELQANKATLVCLISDFYPGAVTVAWKADSSPVKAGVETTTPSKQSNCKYAASSYLSLTPEQWKSHRSYSCQVTHEGSTVEKTVAPTECS

SEQ ID NO: 887 - protein, 106 aa, Artificial Sequence
  An artificially synthesized sequence
GQPKAAPSVTLFPPSSEELQANKATLVCLISDFYPGAVTVAWKADSSPVKAGVETTTPSKQSNNCYAASSYLSLTPEQWKSHRSYSCQVTHEGSTVEKTVAPTECS

SEQ ID NO: 888 - protein, 106 aa, Artificial Sequence
  An artificially synthesized sequence
GQPKAAPSVTLFPPSSEELQANKATLVCLISDFYPGAVTVAWKADSSPVKAGVETTTPSKQSNNKCAASSYLSLTPEQWKSHRSYSCQVTHEGSTVEKTVAPTECS

SEQ ID NO: 889 - protein, 106 aa, Artificial Sequence
  An artificially synthesized sequence
GQPKAAPSVTLFPPSSEELQANKATLVCLISDFYPGAVTVAWKADSSPVKAGVETTTPSKQSNNKYCASSYLSLTPEQWKSHRSYSCQVTHEGSTVEKTVAPTECS

SEQ ID NO: 890 - protein, 106 aa, Artificial Sequence
  An artificially synthesized sequence
GQPKAAPSVTLFPPSSEELQANKATLVCLISDFYPGAVTVAWKADSSPVKAGVETTTPSKQSNNKYACSSYLSLTPEQWKSHRSYSCQVTHEGSTVEKTVAPTECS

SEQ ID NO: 891 - protein, 106 aa, Artificial Sequence
  An artificially synthesized sequence
GQPKAAPSVTLFPPSSEELQANKATLVCLISDFYPGAVTVAWKADSSPVKAGVETTTPSKQSNNKYAASSYLCLTPEQWKSHRSYSCQVTHEGSTVEKTVAPTECS

SEQ ID NO: 892 - protein, 106 aa, Artificial Sequence
  An artificially synthesized sequence
GQPKAAPSVTLFPPSSEELQANKATLVCLISDFYPGAVTVAWKADSSPVKAGVETTTPSKQSNNKYAASSYLSCTPEQWKSHRSYSCQVTHEGSTVEKTVAPTECS

SEQ ID NO: 893 - protein, 106 aa, Artificial Sequence
  An artificially synthesized sequence
GQPKAAPSVTLFPPSSEELQANKATLVCLISDFYPGAVTVAWKADSSPVKAGVETTTPSKQSNNKYAASSYLSLCPEQWKSHRSYSCQVTHEGSTVEKTVAPTECS

SEQ ID NO: 894 - protein, 106 aa, Artificial Sequence
  An artificially synthesized sequence
GQPKAAPSVTLFPPSSEELQANKATLVCLISDFYPGAVTVAWKADSSPVKAGVETTTPSKQSNNKYAASSYLSLTCEQWKSHRSYSCQVTHEGSTVEKTVAPTECS

SEQ ID NO: 895 - protein, 106 aa, Artificial Sequence
  An artificially synthesized sequence
GQPKAAPSVTLFPPSSEELQANKATLVCLISDFYPGAVTVAWKADSSPVKAGVETTTPSKQSNNKYAASSYLSLTPCQWKSHRSYSCQVTHEGSTVEKTVAPTECS

SEQ ID NO: 896 - protein, 106 aa, Artificial Sequence
  An artificially synthesized sequence
GQPKAAPSVTLFPPSSEELQANKATLVCLISDFYPGAVTVAWKADSSPVKAGVETTTPSKQSNNKYAASSYLSLTPECWKSHRSYSCQVTHEGSTVEKTVAPTECS

SEQ ID NO: 897 - protein, 106 aa, Artificial Sequence
  An artificially synthesized sequence
GQPKAAPSVTLFPPSSEELQANKATLVCLISDFYPGAVTVAWKADSSPVKAGVETTTPSKQSNNKYAASSYLSLTPEQCKSHRSYSCQVTHEGSTVEKTVAPTECS

SEQ ID NO: 898 - protein, 106 aa, Artificial Sequence
  An artificially synthesized sequence
GQPKAAPSVTLFPPSSEELQANKATLVCLISDFYPGAVTVAWKADSSPVKAGVETTTPSKQSNNKYAASSYLSLTPEQWCSHRSYSCQVTHEGSTVEKTVAPTECS

SEQ ID NO: 899 - protein, 106 aa, Artificial Sequence
  An artificially synthesized sequence
GQPKAAPSVTLFPPSSEELQANKATLVCLISDFYPGAVTVAWKADSSPVKAGVETTTPSKQSNNKYAASSYLSLTPEQWKCHRSYSCQVTHEGSTVEKTVAPTECS

SEQ ID NO: 900 - protein, 106 aa, Artificial Sequence
  An artificially synthesized sequence
GQPKAAPSVTLFPPSSEELQANKATLVCLISDFYPGAVTVAWKADSSPVKAGVETTTPSKQSNNKYAASSYLSLTPEQWKSCRSYSCQVTHEGSTVEKTVAPTECS

SEQ ID NO: 901 - protein, 106 aa, Artificial Sequence
  An artificially synthesized sequence
GQPKAAPSVTLFPPSSEELQANKATLVCLISDFYPGAVTVAWKADSSPVKAGVETTTPSKQSNNKYAASSYLSLTPEQWKSHCSYSCQVTHEGSTVEKTVAPTECS

SEQ ID NO: 902 - protein, 106 aa, Artificial Sequence
  An artificially synthesized sequence
GQPKAAPSVTLFPPSSEELQANKATLVCLISDFYPGAVTVAWKADSSPVKAGVETTTPSKQSNNKYAASSYLSLTPEQWKSHRCYSCQVTHEGSTVEKTVAPTECS

SEQ ID NO: 903 - protein, 106 aa, Artificial Sequence
  An artificially synthesized sequence
GQPKAAPSVTLFPPSSEELQANKATLVCLISDFYPGAVTVAWKADSSPVKAGVETTTPSKQSNNKYAASSYLSLTPEQWKSHRSCSCQVTHEGSTVEKTVAPTECS

SEQ ID NO: 904 - protein, 106 aa, Artificial Sequence
  An artificially synthesized sequence
GQPKAAPSVTLFPPSSEELQANKATLVCLISDFYPGAVTVAWKADSSPVKAGVETTTPSKQSNNKYAASSYLSLTPEQWKSHRSYCCQVTHEGSTVEKTVAPTECS

SEQ ID NO: 905 - protein, 106 aa, Artificial Sequence
  An artificially synthesized sequence
GQPKAAPSVTLFPPSSEELQANKATLVCLISDFYPGAVTVAWKADSSPVKAGVETTTPSKQSNNKYAASSYLSLTPEQWKSHRSYSCCVTHEGSTVEKTVAPTECS

SEQ ID NO: 906 - protein, 106 aa, Artificial Sequence
  An artificially synthesized sequence
GQPKAAPSVTLFPPSSEELQANKATLVCLISDFYPGAVTVAWKADSSPVKAGVETTTPSKQSNNKYAASSYLSLTPEQWKSHRSYSCQCTHEGSTVEKTVAPTECS

SEQ ID NO: 907 - protein, 106 aa, Artificial Sequence
  An artificially synthesized sequence
GQPKAAPSVTLFPPSSEELQANKATLVCLISDFYPGAVTVAWKADSSPVKAGVETTTPSKQSNNKYAASSYLSLTPEQWKSHRSYSCQVCHEGSTVEKTVAPTECS

SEQ ID NO: 908 - protein, 106 aa, Artificial Sequence
  An artificially synthesized sequence
GQPKAAPSVTLFPPSSEELQANKATLVCLISDFYPGAVTVAWKADSSPVKAGVETTTPSKQSNNKYAASSYLSLTPEQWKSHRSYSCQVTCEGSTVEKTVAPTECS

SEQ ID NO: 909 - protein, 106 aa, Artificial Sequence
  An artificially synthesized sequence
GQPKAAPSVTLFPPSSEELQANKATLVCLISDFYPGAVTVAWKADSSPVKAGVETTTPSKQSNNKYAASSYLSLTPEQWKSHRSYSCQVTHCGSTVEKTVAPTECS

SEQ ID NO: 910 - protein, 106 aa, Artificial Sequence
  An artificially synthesized sequence
GQPKAAPSVTLFPPSSEELQANKATLVCLISDFYPGAVTVAWKADSSPVKAGVETTTPSKQSNNKYAASSYLSLTPEQWKSHRSYSCQVTHECSTVEKTVAPTECS

SEQ ID NO: 911 - protein, 106 aa, Artificial Sequence
  An artificially synthesized sequence
GQPKAAPSVTLFPPSSEELQANKATLVCLISDFYPGAVTVAWKADSSPVKAGVETTTPSKQSNNKYAASSYLSLTPEQWKSHRSYSCQVTHEGCTVEKTVAPTECS

SEQ ID NO: 912 - protein, 106 aa, Artificial Sequence
  An artificially synthesized sequence
GQPKAAPSVTLFPPSSEELQANKATLVCLISDFYPGAVTVAWKADSSPVKAGVETTTPSKQSNNKYAASSYLSLTPEQWKSHRSYSCQVTHEGSCVEKTVAPTECS

SEQ ID NO: 913 - protein, 106 aa, Artificial Sequence
  An artificially synthesized sequence
GQPKAAPSVTLFPPSSEELQANKATLVCLISDFYPGAVTVAWKADSSPVKAGVETTTPSKQSNNKYAASSYLSLTPEQWKSHRSYSCQVTHEGSTCEKTVAPTECS

SEQ ID NO: 914 - protein, 106 aa, Artificial Sequence
  An artificially synthesized sequence
GQPKAAPSVTLFPPSSEELQANKATLVCLISDFYPGAVTVAWKADSSPVKAGVETTTPSKQSNNKYAASSYLSLTPEQWKSHRSYSCQVTHEGSTVCKTVAPTECS

SEQ ID NO: 915 - protein, 106 aa, Artificial Sequence
  An artificially synthesized sequence
GQPKAAPSVTLFPPSSEELQANKATLVCLISDFYPGAVTVAWKADSSPVKAGVETTTPSKQSNNKYAASSYLSLTPEQWKSHRSYSCQVTHEGSTVECTVAPTECS

SEQ ID NO: 916 - protein, 106 aa, Artificial Sequence
  An artificially synthesized sequence
GQPKAAPSVTLFPPSSEELQANKATLVCLISDFYPGAVTVAWKADSSPVKAGVETTTPSKQSNNKYAASSYLSLTPEQWKSHRSYSCQVTHEGSTVEKCVAPTECS

SEQ ID NO: 917 - protein, 106 aa, Artificial Sequence
  An artificially synthesized sequence
GQPKAAPSVTLFPPSSEELQANKATLVCLISDFYPGAVTVAWKADSSPVKAGVETTTPSKQSNNKYAASSYLSLTPEQWKSHRSYSCQVTHEGSTVEKTCAPTECS

SEQ ID NO: 918 - protein, 106 aa, Artificial Sequence
  An artificially synthesized sequence
GQPKAAPSVTLFPPSSEELQANKATLVCLISDFYPGAVTVAWKADSSPVKAGVETTTPSKQSNNKYAASSYLSLTPEQWKSHRSYSCQVTHEGSTVEKTVCPTECS

SEQ ID NO: 919 - protein, 106 aa, Artificial Sequence
  An artificially synthesized sequence
GQPKAAPSVTLFPPSSEELQANKATLVCLISDFYPGAVTVAWKADSSPVKAGVETTTPSKQSNNKYAASSYLSLTPEQWKSHRSYSCQVTHEGSTVEKTVACTECS

SEQ ID NO: 920 - protein, 106 aa, Artificial Sequence
  An artificially synthesized sequence
GQPKAAPSVTLFPPSSEELQANKATLVCLISDFYPGAVTVAWKADSSPVKAGVETTTPSKQSNNKYAASSYLSLTPEQWKSHRSYSCQVTHEGSTVEKTVAPCECS

SEQ ID NO: 921 - protein, 106 aa, Artificial Sequence
  An artificially synthesized sequence
GQPKAAPSVTLFPPSSEELQANKATLVCLISDFYPGAVTVAWKADSSPVKAGVETTTPSKQSNNKYAASSYLSLTPEQWKSHRSYSCQVTHEGSTVEKTVAPTCCS

SEQ ID NO: 922 - protein, 127 aa, Artificial Sequence
  An artificially synthesized sequence
CVQLVESGGGLVQPGGSLRLSCAASGFTFDDYGMSWVRQAPGKALEWVSAISWNGNNTYYTESMKGRFTISRDNAKNTLYLQMNSLRPEDTAVYYCVKGSTAIVGVPPTYPDEYDYWGQGTLVTVSS

SEQ ID NO: 923 - protein, 127 aa, Artificial Sequence
  An artificially synthesized sequence
ECQLVESGGGLVQPGGSLRLSCAASGFTFDDYGMSWVRQAPGKALEWVSAISWNGNNTYYTESMKGRFTISRDNAKNTLYLQMNSLRPEDTAVYYCVKGSTAIVGVPPTYPDEYDYWGQGTLVTVSS

SEQ ID NO: 924 - protein, 127 aa, Artificial Sequence
  An artificially synthesized sequence
EVCLVESGGGLVQPGGSLRLSCAASGFTFDDYGMSWVRQAPGKALEWVSAISWNGNNTYYTESMKGRFTISRDNAKNTLYLQMNSLRPEDTAVYYCVKGSTAIVGVPPTYPDEYDYWGQGTLVTVSS

SEQ ID NO: 925 - protein, 127 aa, Artificial Sequence
  An artificially synthesized sequence
EVQCVESGGGLVQPGGSLRLSCAASGFTFDDYGMSWVRQAPGKALEWVSAISWNGNNTYYTESMKGRFTISRDNAKNTLYLQMNSLRPEDTAVYYCVKGSTAIVGVPPTYPDEYDYWGQGTLVTVSS

SEQ ID NO: 926 - protein, 127 aa, Artificial Sequence
  An artificially synthesized sequence
EVQLCESGGGLVQPGGSLRLSCAASGFTFDDYGMSWVRQAPGKALEWVSAISWNGNNTYYTESMKGRFTISRDNAKNTLYLQMNSLRPEDTAVYYCVKGSTAIVGVPPTYPDEYDYWGQGTLVTVSS

SEQ ID NO: 927 - protein, 127 aa, Artificial Sequence
  An artificially synthesized sequence
EVQLVCSGGGLVQPGGSLRLSCAASGFTFDDYGMSWVRQAPGKALEWVSAISWNGNNTYYTESMKGRFTISRDNAKNTLYLQMNSLRPEDTAVYYCVKGSTAIVGVPPTYPDEYDYWGQGTLVTVSS

SEQ ID NO: 928 - protein, 127 aa, Artificial Sequence
  An artificially synthesized sequence
EVQLVECGGGLVQPGGSLRLSCAASGFTFDDYGMSWVRQAPGKALEWVSAISWNGNNTYYTESMKGRFTISRDNAKNTLYLQMNSLRPEDTAVYYCVKGSTAIVGVPPTYPDEYDYWGQGTLVTVSS

SEQ ID NO: 929 - protein, 127 aa, Artificial Sequence
  An artificially synthesized sequence
EVQLVESCGGLVQPGGSLRLSCAASGFTFDDYGMSWVRQAPGKALEWVSAISWNGNNTYYTESMKGRFTISRDNAKNTLYLQMNSLRPEDTAVYYCVKGSTAIVGVPPTYPDEYDYWGQGTLVTVSS

SEQ ID NO: 930 - protein, 127 aa, Artificial Sequence
  An artificially synthesized sequence
EVQLVESGCGLVQPGGSLRLSCAASGFTFDDYGMSWVRQAPGKALEWVSAISWNGNNTYYTESMKGRFTISRDNAKNTLYLQMNSLRPEDTAVYYCVKGSTAIVGVPPTYPDEYDYWGQGTLVTVSS

SEQ ID NO: 931 - protein, 127 aa, Artificial Sequence
  An artificially synthesized sequence
EVQLVESGGCLVQPGGSLRLSCAASGFTFDDYGMSWVRQAPGKALEWVSAISWNGNNTYYTESMKGRFTISRDNAKNTLYLQMNSLRPEDTAVYYCVKGSTAIVGVPPTYPDEYDYWGQGTLVTVSS

SEQ ID NO: 932 - protein, 127 aa, Artificial Sequence
  An artificially synthesized sequence
EVQLVESGGGCVQPGGSLRLSCAASGFTFDDYGMSWVRQAPGKALEWVSAISWNGNNTYYTESMKGRFTISRDNAKNTLYLQMNSLRPEDTAVYYCVKGSTAIVGVPPTYPDEYDYWGQGTLVTVSS

SEQ ID NO: 933 - protein, 127 aa, Artificial Sequence
  An artificially synthesized sequence
EVQLVESGGGLCQPGGSLRLSCAASGFTFDDYGMSWVRQAPGKALEWVSAISWNGNNTYYTESMKGRFTISRDNAKNTLYLQMNSLRPEDTAVYYCVKGSTAIVGVPPTYPDEYDYWGQGTLVTVSS

SEQ ID NO: 934 - protein, 127 aa, Artificial Sequence
  An artificially synthesized sequence
EVQLVESGGGLVCPGGSLRLSCAASGFTFDDYGMSWVRQAPGKALEWVSAISWNGNNTYYTESMKGRFTISRDNAKNTLYLQMNSLRPEDTAVYYCVKGSTAIVGVPPTYPDEYDYWGQGTLVTVSS

SEQ ID NO: 935 - protein, 127 aa, Artificial Sequence
  An artificially synthesized sequence
EVQLVESGGGLVQCGGSLRLSCAASGFTFDDYGMSWVRQAPGKALEWVSAISWNGNNTYYTESMKGRFTISRDNAKNTLYLQMNSLRPEDTAVYYCVKGSTAIVGVPPTYPDEYDYWGQGTLVTVSS

SEQ ID NO: 936 - protein, 127 aa, Artificial Sequence
  An artificially synthesized sequence
EVQLVESGGGLVQPCGSLRLSCAASGFTFDDYGMSWVRQAPGKALEWVSAISWNGNNTYYTESMKGRFTISRDNAKNTLYLQMNSLRPEDTAVYYCVKGSTAIVGVPPTYPDEYDYWGQGTLVTVSS

SEQ ID NO: 937 - protein, 127 aa, Artificial Sequence
  An artificially synthesized sequence
EVQLVESGGGLVQPGCSLRLSCAASGFTFDDYGMSWVRQAPGKALEWVSAISWNGNNTYYTESMKGRFTISRDNAKNTLYLQMNSLRPEDTAVYYCVKGSTAIVGVPPTYPDEYDYWGQGTLVTVSS

SEQ ID NO: 938 - protein, 127 aa, Artificial Sequence
  An artificially synthesized sequence
EVQLVESGGGLVQPGGCLRLSCAASGFTFDDYGMSWVRQAPGKALEWVSAISWNGNNTYYTESMKGRFTISRDNAKNTLYLQMNSLRPEDTAVYYCVKGSTAIVGVPPTYPDEYDYWGQGTLVTVSS

SEQ ID NO: 939 - protein, 127 aa, Artificial Sequence
  An artificially synthesized sequence
EVQLVESGGGLVQPGGSCRLSCAASGFTFDDYGMSWVRQAPGKALEWVSAISWNGNNTYYTESMKGRFTISRDNAKNTLYLQMNSLRPEDTAVYYCVKGSTAIVGVPPTYPDEYDYWGQGTLVTVSS

SEQ ID NO: 940 - protein, 127 aa, Artificial Sequence
  An artificially synthesized sequence
EVQLVESGGGLVQPGGSLCLSCAASGFTFDDYGMSWVRQAPGKALEWVSAISWNGNNTYYTESMKGRFTISRDNAKNTLYLQMNSLRPEDTAVYYCVKGSTAIVGVPPTYPDEYDYWGQGTLVTVSS

SEQ ID NO: 941 - protein, 127 aa, Artificial Sequence
  An artificially synthesized sequence
EVQLVESGGGLVQPGGSLRCSCAASGFTFDDYGMSWVRQAPGKALEWVSAISWNGNNTYYTESMKGRFTISRDNAKNTLYLQMNSLRPEDTAVYYCVKGSTAIVGVPPTYPDEYDYWGQGTLVTVSS

SEQ ID NO: 942 - protein, 127 aa, Artificial Sequence
  An artificially synthesized sequence
EVQLVESGGGLVQPGGSLRLCCAASGFTFDDYGMSWVRQAPGKALEWVSAISWNGNNTYYTESMKGRFTISRDNAKNTLYLQMNSLRPEDTAVYYCVKGSTAIVGVPPTYPDEYDYWGQGTLVTVSS

SEQ ID NO: 943 - protein, 127 aa, Artificial Sequence
  An artificially synthesized sequence
EVQLVESGGGLVQPGGSLRLSCCASGFTFDDYGMSWVRQAPGKALEWVSAISWNGNNTYYTESMKGRFTISRDNAKNTLYLQMNSLRPEDTAVYYCVKGSTAIVGVPPTYPDEYDYWGQGTLVTVSS

SEQ ID NO: 944 - protein, 127 aa, Artificial Sequence
  An artificially synthesized sequence
EVQLVESGGGLVQPGGSLRLSCACSGFTFDDYGMSWVRQAPGKALEWVSAISWNGNNTYYTESMKGRFTISRDNAKNTLYLQMNSLRPEDTAVYYCVKGSTAIVGVPPTYPDEYDYWGQGTLVTVSS

SEQ ID NO: 945 - protein, 127 aa, Artificial Sequence
  An artificially synthesized sequence
EVQLVESGGGLVQPGGSLRLSCAACGFTFDDYGMSWVRQAPGKALEWVSAISWNGNNTYYTESMKGRFTISRDNAKNTLYLQMNSLRPEDTAVYYCVKGSTAIVGVPPTYPDEYDYWGQGTLVTVSS

SEQ ID NO: 946 - protein, 127 aa, Artificial Sequence
  An artificially synthesized sequence
EVQLVESGGGLVQPGGSLRLSCAASCFTFDDYGMSWVRQAPGKALEWVSAISWNGNNTYYTESMKGRFTISRDNAKNTLYLQMNSLRPEDTAVYYCVKGSTAIVGVPPTYPDEYDYWGQGTLVTVSS

SEQ ID NO: 947 - protein, 127 aa, Artificial Sequence
  An artificially synthesized sequence
EVQLVESGGGLVQPGGSLRLSCAASGCTFDDYGMSWVRQAPGKALEWVSAISWNGNNTYYTESMKGRFTISRDNAKNTLYLQMNSLRPEDTAVYYCVKGSTAIVGVPPTYPDEYDYWGQGTLVTVSS

SEQ ID NO: 948 - protein, 127 aa, Artificial Sequence
  An artificially synthesized sequence
EVQLVESGGGLVQPGGSLRLSCAASGFCFDDYGMSWVRQAPGKALEWVSAISWNGNNTYYTESMKGRFTISRDNAKNTLYLQMNSLRPEDTAVYYCVKGSTAIVGVPPTYPDEYDYWGQGTLVTVSS

SEQ ID NO: 949 - protein, 127 aa, Artificial Sequence
  An artificially synthesized sequence
EVQLVESGGGLVQPGGSLRLSCAASGFTCDDYGMSWVRQAPGKALEWVSAISWNGNNTYYTESMKGRFTISRDNAKNTLYLQMNSLRPEDTAVYYCVKGSTAIVGVPPTYPDEYDYWGQGTLVTVSS

SEQ ID NO: 950 - protein, 127 aa, Artificial Sequence
  An artificially synthesized sequence
EVQLVESGGGLVQPGGSLRLSCAASGFTFCDYGMSWVRQAPGKALEWVSAISWNGNNTYYTESMKGRFTISRDNAKNTLYLQMNSLRPEDTAVYYCVKGSTAIVGVPPTYPDEYDYWGQGTLVTVSS

SEQ ID NO: 951 - protein, 127 aa, Artificial Sequence
  An artificially synthesized sequence
EVQLVESGGGLVQPGGSLRLSCAASGFTFDDYGMSCVRQAPGKALEWVSAISWNGNNTYYTESMKGRFTISRDNAKNTLYLQMNSLRPEDTAVYYCVKGSTAIVGVPPTYPDEYDYWGQGTLVTVSS

SEQ ID NO: 952 - protein, 127 aa, Artificial Sequence
  An artificially synthesized sequence
EVQLVESGGGLVQPGGSLRLSCAASGFTFDDYGMSWCRQAPGKALEWVSAISWNGNNTYYTESMKGRFTISRDNAKNTLYLQMNSLRPEDTAVYYCVKGSTAIVGVPPTYPDEYDYWGQGTLVTVSS

SEQ ID NO: 953 - protein, 127 aa, Artificial Sequence
  An artificially synthesized sequence
EVQLVESGGGLVQPGGSLRLSCAASGFTFDDYGMSWVCQAPGKALEWVSAISWNGNNTYYTESMKGRFTISRDNAKNTLYLQMNSLRPEDTAVYYCVKGSTAIVGVPPTYPDEYDYWGQGTLVTVSS

SEQ ID NO: 954 - protein, 127 aa, Artificial Sequence
  An artificially synthesized sequence
EVQLVESGGGLVQPGGSLRLSCAASGFTFDDYGMSWVRCAPGKALEWVSAISWNGNNTYYTESMKGRFTISRDNAKNTLYLQMNSLRPEDTAVYYCVKGSTAIVGVPPTYPDEYDYWGQGTLVTVSS

SEQ ID NO: 955 - protein, 127 aa, Artificial Sequence
  An artificially synthesized sequence
EVQLVESGGGLVQPGGSLRLSCAASGFTFDDYGMSWVRQCPGKALEWVSAISWNGNNTYYTESMKGRFTISRDNAKNTLYLQMNSLRPEDTAVYYCVKGSTAIVGVPPTYPDEYDYWGQGTLVTVSS

SEQ ID NO: 956 - protein, 127 aa, Artificial Sequence
  An artificially synthesized sequence
EVQLVESGGGLVQPGGSLRLSCAASGFTFDDYGMSWVRQACGKALEWVSAISWNGNNTYYTESMKGRFTISRDNAKNTLYLQMNSLRPEDTAVYYCVKGSTAIVGVPPTYPDEYDYWGQGTLVTVSS

SEQ ID NO: 957 - protein, 127 aa, Artificial Sequence
  An artificially synthesized sequence
EVQLVESGGGLVQPGGSLRLSCAASGFTFDDYGMSWVRQAPCKALEWVSAISWNGNNTYYTESMKGRFTISRDNAKNTLYLQMNSLRPEDTAVYYCVKGSTAIVGVPPTYPDEYDYWGQGTLVTVSS

SEQ ID NO: 958 - protein, 127 aa, Artificial Sequence
  An artificially synthesized sequence
EVQLVESGGGLVQPGGSLRLSCAASGFTFDDYGMSWVRQAPGCALEWVSAISWNGNNTYYTESMKGRFTISRDNAKNTLYLQMNSLRPEDTAVYYCVKGSTAIVGVPPTYPDEYDYWGQGTLVTVSS

SEQ ID NO: 959 - protein, 127 aa, Artificial Sequence
  An artificially synthesized sequence
EVQLVESGGGLVQPGGSLRLSCAASGFTFDDYGMSWVRQAPGKCLEWVSAISWNGNNTYYTESMKGRFTISRDNAKNTLYLQMNSLRPEDTAVYYCVKGSTAIVGVPPTYPDEYDYWGQGTLVTVSS

SEQ ID NO: 960 - protein, 127 aa, Artificial Sequence
  An artificially synthesized sequence
EVQLVESGGGLVQPGGSLRLSCAASGFTFDDYGMSWVRQAPGKACEWVSAISWNGNNTYYTESMKGRFTISRDNAKNTLYLQMNSLRPEDTAVYYCVKGSTAIVGVPPTYPDEYDYWGQGTLVTVSS

SEQ ID NO: 961 - protein, 127 aa, Artificial Sequence
  An artificially synthesized sequence
EVQLVESGGGLVQPGGSLRLSCAASGFTFDDYGMSWVRQAPGKALCWVSAISWNGNNTYYTESMKGRFTISRDNAKNTLYLQMNSLRPEDTAVYYCVKGSTAIVGVPPTYPDEYDYWGQGTLVTVSS

SEQ ID NO: 962 - protein, 127 aa, Artificial Sequence
  An artificially synthesized sequence
EVQLVESGGGLVQPGGSLRLSCAASGFTFDDYGMSWVRQAPGKALECVSAISWNGNNTYYTESMKGRFTISRDNAKNTLYLQMNSLRPEDTAVYYCVKGSTAIVGVPPTYPDEYDYWGQGTLVTVSS

SEQ ID NO: 963 - protein, 127 aa, Artificial Sequence
  An artificially synthesized sequence
EVQLVESGGGLVQPGGSLRLSCAASGFTFDDYGMSWVRQAPGKALEWCSAISWNGNNTYYTESMKGRFTISRDNAKNTLYLQMNSLRPEDTAVYYCVKGSTAIVGVPPTYPDEYDYWGQGTLVTVSS

SEQ ID NO: 964 - protein, 127 aa, Artificial Sequence
  An artificially synthesized sequence
EVQLVESGGGLVQPGGSLRLSCAASGFTFDDYGMSWVRQAPGKALEWVCAISWNGNNTYYTESMKGRFTISRDNAKNTLYLQMNSLRPEDTAVYYCVKGSTAIVGVPPTYPDEYDYWGQGTLVTVSS

SEQ ID NO: 965 - protein, 127 aa, Artificial Sequence
  An artificially synthesized sequence
EVQLVESGGGLVQPGGSLRLSCAASGFTFDDYGMSWVRQAPGKALEWVSAISWNGNNTYYTESMKGCFTISRDNAKNTLYLQMNSLRPEDTAVYYCVKGSTAIVGVPPTYPDEYDYWGQGTLVTVSS

SEQ ID NO: 966 - protein, 127 aa, Artificial Sequence
  An artificially synthesized sequence
EVQLVESGGGLVQPGGSLRLSCAASGFTFDDYGMSWVRQAPGKALEWVSAISWNGNNTYYTESMKGRCTISRDNAKNTLYLQMNSLRPEDTAVYYCVKGSTAIVGVPPTYPDEYDYWGQGTLVTVSS

SEQ ID NO: 967 - protein, 127 aa, Artificial Sequence
  An artificially synthesized sequence
EVQLVESGGGLVQPGGSLRLSCAASGFTFDDYGMSWVRQAPGKALEWVSAISWNGNNTYYTESMKGRFCISRDNAKNTLYLQMNSLRPEDTAVYYCVKGSTAIVGVPPTYPDEYDYWGQGTLVTVSS

SEQ ID NO: 968 - protein, 127 aa, Artificial Sequence
  An artificially synthesized sequence
EVQLVESGGGLVQPGGSLRLSCAASGFTFDDYGMSWVRQAPGKALEWVSAISWNGNNTYYTESMKGRFTCSRDNAKNTLYLQMNSLRPEDTAVYYCVKGSTAIVGVPPTYPDEYDYWGQGTLVTVSS

SEQ ID NO: 969 - protein, 127 aa, Artificial Sequence
  An artificially synthesized sequence
EVQLVESGGGLVQPGGSLRLSCAASGFTFDDYGMSWVRQAPGKALEWVSAISWNGNNTYYTESMKGRFTICRDNAKNTLYLQMNSLRPEDTAVYYCVKGSTAIVGVPPTYPDEYDYWGQGTLVTVSS

SEQ ID NO: 970 - protein, 127 aa, Artificial Sequence
  An artificially synthesized sequence
EVQLVESGGGLVQPGGSLRLSCAASGFTFDDYGMSWVRQAPGKALEWVSAISWNGNNTYYTESMKGRFTISCDNAKNTLYLQMNSLRPEDTAVYYCVKGSTAIVGVPPTYPDEYDYWGQGTLVTVSS

SEQ ID NO: 971 - protein, 127 aa, Artificial Sequence
  An artificially synthesized sequence
EVQLVESGGGLVQPGGSLRLSCAASGFTFDDYGMSWVRQAPGKALEWVSAISWNGNNTYYTESMKGRFTISRCNAKNTLYLQMNSLRPEDTAVYYCVKGSTAIVGVPPTYPDEYDYWGQGTLVTVSS

SEQ ID NO: 972 - protein, 127 aa, Artificial Sequence
  An artificially synthesized sequence
EVQLVESGGGLVQPGGSLRLSCAASGFTFDDYGMSWVRQAPGKALEWVSAISWNGNNTYYTESMKGRFTISRDCAKNTLYLQMNSLRPEDTAVYYCVKGSTAIVGVPPTYPDEYDYWGQGTLVTVSS

SEQ ID NO: 973 - protein, 127 aa, Artificial Sequence
  An artificially synthesized sequence
EVQLVESGGGLVQPGGSLRLSCAASGFTFDDYGMSWVRQAPGKALEWVSAISWNGNNTYYTESMKGRFTISRDNCKNTLYLQMNSLRPEDTAVYYCVKGSTAIVGVPPTYPDEYDYWGQGTLVTVSS

SEQ ID NO: 974 - protein, 127 aa, Artificial Sequence
  An artificially synthesized sequence
EVQLVESGGGLVQPGGSLRLSCAASGFTFDDYGMSWVRQAPGKALEWVSAISWNGNNTYYTESMKGRFTISRDNACNTLYLQMNSLRPEDTAVYYCVKGSTAIVGVPPTYPDEYDYWGQGTLVTVSS

SEQ ID NO: 975 - protein, 127 aa, Artificial Sequence
  An artificially synthesized sequence
EVQLVESGGGLVQPGGSLRLSCAASGFTFDDYGMSWVRQAPGKALEWVSAISWNGNNTYYTESMKGRFTISRDNAKCTLYLQMNSLRPEDTAVYYCVKGSTAIVGVPPTYPDEYDYWGQGTLVTVSS

SEQ ID NO: 976 - protein, 127 aa, Artificial Sequence
  An artificially synthesized sequence
EVQLVESGGGLVQPGGSLRLSCAASGFTFDDYGMSWVRQAPGKALEWVSAISWNGNNTYYTESMKGRFTISRDNAKNCLYLQMNSLRPEDTAVYYCVKGSTAIVGVPPTYPDEYDYWGQGTLVTVSS

SEQ ID NO: 977 - protein, 127 aa, Artificial Sequence
  An artificially synthesized sequence
EVQLVESGGGLVQPGGSLRLSCAASGFTFDDYGMSWVRQAPGKALEWVSAISWNGNNTYYTESMKGRFTISRDNAKNTCYLQMNSLRPEDTAVYYCVKGSTAIVGVPPTYPDEYDYWGQGTLVTVSS

SEQ ID NO: 978 - protein, 127 aa, Artificial Sequence
  An artificially synthesized sequence
EVQLVESGGGLVQPGGSLRLSCAASGFTFDDYGMSWVRQAPGKALEWVSAISWNGNNTYYTESMKGRFTISRDNAKNTLCLQMNSLRPEDTAVYYCVKGSTAIVGVPPTYPDEYDYWGQGTLVTVSS

SEQ ID NO: 979 - protein, 127 aa, Artificial Sequence
  An artificially synthesized sequence
EVQLVESGGGLVQPGGSLRLSCAASGFTFDDYGMSWVRQAPGKALEWVSAISWNGNNTYYTESMKGRFTISRDNAKNTLYCQMNSLRPEDTAVYYCVKGSTAIVGVPPTYPDEYDYWGQGTLVTVSS

SEQ ID NO: 980 - protein, 127 aa, Artificial Sequence
  An artificially synthesized sequence
EVQLVESGGGLVQPGGSLRLSCAASGFTFDDYGMSWVRQAPGKALEWVSAISWNGNNTYYTESMKGRFTISRDNAKNTLYLCMNSLRPEDTAVYYCVKGSTAIVGVPPTYPDEYDYWGQGTLVTVSS

SEQ ID NO: 981 - protein, 127 aa, Artificial Sequence
  An artificially synthesized sequence
EVQLVESGGGLVQPGGSLRLSCAASGFTFDDYGMSWVRQAPGKALEWVSAISWNGNNTYYTESMKGRFTISRDNAKNTLYLQCNSLRPEDTAVYYCVKGSTAIVGVPPTYPDEYDYWGQGTLVTVSS

SEQ ID NO: 982 - protein, 127 aa, Artificial Sequence
  An artificially synthesized sequence
EVQLVESGGGLVQPGGSLRLSCAASGFTFDDYGMSWVRQAPGKALEWVSAISWNGNNTYYTESMKGRFTISRDNAKNTLYLQMCSLRPEDTAVYYCVKGSTAIVGVPPTYPDEYDYWGQGTLVTVSS

SEQ ID NO: 983 - protein, 127 aa, Artificial Sequence
  An artificially synthesized sequence
EVQLVESGGGLVQPGGSLRLSCAASGFTFDDYGMSWVRQAPGKALEWVSAISWNGNNTYYTESMKGRFTISRDNAKNTLYLQMNCLRPEDTAVYYCVKGSTAIVGVPPTYPDEYDYWGQGTLVTVSS

SEQ ID NO: 984 - protein, 127 aa, Artificial Sequence
  An artificially synthesized sequence
EVQLVESGGGLVQPGGSLRLSCAASGFTFDDYGMSWVRQAPGKALEWVSAISWNGNNTYYTESMKGRFTISRDNAKNTLYLQMNSCRPEDTAVYYCVKGSTAIVGVPPTYPDEYDYWGQGTLVTVSS

SEQ ID NO: 985 - protein, 127 aa, Artificial Sequence
  An artificially synthesized sequence
EVQLVESGGGLVQPGGSLRLSCAASGFTFDDYGMSWVRQAPGKALEWVSAISWNGNNTYYTESMKGRFTISRDNAKNTLYLQMNSLCPEDTAVYYCVKGSTAIVGVPPTYPDEYDYWGQGTLVTVSS

SEQ ID NO: 986 - protein, 127 aa, Artificial Sequence
  An artificially synthesized sequence
EVQLVESGGGLVQPGGSLRLSCAASGFTFDDYGMSWVRQAPGKALEWVSAISWNGNNTYYTESMKGRFTISRDNAKNTLYLQMNSLRCEDTAVYYCVKGSTAIVGVPPTYPDEYDYWGQGTLVTVSS

SEQ ID NO: 987 - protein, 127 aa, Artificial Sequence
  An artificially synthesized sequence
EVQLVESGGGLVQPGGSLRLSCAASGFTFDDYGMSWVRQAPGKALEWVSAISWNGNNTYYTESMKGRFTISRDNAKNTLYLQMNSLRPCDTAVYYCVKGSTAIVGVPPTYPDEYDYWGQGTLVTVSS

SEQ ID NO: 988 - protein, 127 aa, Artificial Sequence
  An artificially synthesized sequence
EVQLVESGGGLVQPGGSLRLSCAASGFTFDDYGMSWVRQAPGKALEWVSAISWNGNNTYYTESMKGRFTISRDNAKNTLYLQMNSLRPECTAVYYCVKGSTAIVGVPPTYPDEYDYWGQGTLVTVSS

SEQ ID NO: 989 - protein, 127 aa, Artificial Sequence
  An artificially synthesized sequence
EVQLVESGGGLVQPGGSLRLSCAASGFTFDDYGMSWVRQAPGKALEWVSAISWNGNNTYYTESMKGRFTISRDNAKNTLYLQMNSLRPEDCAVYYCVKGSTAIVGVPPTYPDEYDYWGQGTLVTVSS

SEQ ID NO: 990 - protein, 127 aa, Artificial Sequence
  An artificially synthesized sequence
EVQLVESGGGLVQPGGSLRLSCAASGFTFDDYGMSWVRQAPGKALEWVSAISWNGNNTYYTESMKGRFTISRDNAKNTLYLQMNSLRPEDTCVYYCVKGSTAIVGVPPTYPDEYDYWGQGTLVTVSS

SEQ ID NO: 991 - protein, 127 aa, Artificial Sequence
  An artificially synthesized sequence
EVQLVESGGGLVQPGGSLRLSCAASGFTFDDYGMSWVRQAPGKALEWVSAISWNGNNTYYTESMKGRFTISRDNAKNTLYLQMNSLRPEDTACYYCVKGSTAIVGVPPTYPDEYDYWGQGTLVTVSS

SEQ ID NO: 992 - protein, 127 aa, Artificial Sequence
  An artificially synthesized sequence
EVQLVESGGGLVQPGGSLRLSCAASGFTFDDYGMSWVRQAPGKALEWVSAISWNGNNTYYTESMKGRFTISRDNAKNTLYLQMNSLRPEDTAVCYCVKGSTAIVGVPPTYPDEYDYWGQGTLVTVSS

SEQ ID NO: 993 - protein, 127 aa, Artificial Sequence
  An artificially synthesized sequence
EVQLVESGGGLVQPGGSLRLSCAASGFTFDDYGMSWVRQAPGKALEWVSAISWNGNNTYYTESMKGRFTISRDNAKNTLYLQMNSLRPEDTAVYCCVKGSTAIVGVPPTYPDEYDYWGQGTLVTVSS

SEQ ID NO: 994 - protein, 127 aa, Artificial Sequence
  An artificially synthesized sequence
EVQLVESGGGLVQPGGSLRLSCAASGFTFDDYGMSWVRQAPGKALEWVSAISWNGNNTYYTESMKGRFTISRDNAKNTLYLQMNSLRPEDTAVYYCCKGSTAIVGVPPTYPDEYDYWGQGTLVTVSS

SEQ ID NO: 995 - protein, 127 aa, Artificial Sequence
  An artificially synthesized sequence
EVQLVESGGGLVQPGGSLRLSCAASGFTFDDYGMSWVRQAPGKALEWVSAISWNGNNTYYTESMKGRFTISRDNAKNTLYLQMNSLRPEDTAVYYCVCGSTAIVGVPPTYPDEYDYWGQGTLVTVSS

SEQ ID NO: 996 - protein, 127 aa, Artificial Sequence
  An artificially synthesized sequence
EVQLVESGGGLVQPGGSLRLSCAASGFTFDDYGMSWVRQAPGKALEWVSAISWNGNNTYYTESMKGRFTISRDNAKNTLYLQMNSLRPEDTAVYYCVKGSTAIVGVPPTYPDEYDYCGQGTLVTVSS

SEQ ID NO: 997 - protein, 127 aa, Artificial Sequence
  An artificially synthesized sequence
EVQLVESGGGLVQPGGSLRLSCAASGFTFDDYGMSWVRQAPGKALEWVSAISWNGNNTYYTESMKGRFTISRDNAKNTLYLQMNSLRPEDTAVYYCVKGSTAIVGVPPTYPDEYDYWCQGTLVTVSS

SEQ ID NO: 998 - protein, 127 aa, Artificial Sequence
  An artificially synthesized sequence
EVQLVESGGGLVQPGGSLRLSCAASGFTFDDYGMSWVRQAPGKALEWVSAISWNGNNTYYTESMKGRFTISRDNAKNTLYLQMNSLRPEDTAVYYCVKGSTAIVGVPPTYPDEYDYWGCGTLVTVSS

SEQ ID NO: 999 - protein, 127 aa, Artificial Sequence
  An artificially synthesized sequence
EVQLVESGGGLVQPGGSLRLSCAASGFTFDDYGMSWVRQAPGKALEWVSAISWNGNNTYYTESMKGRFTISRDNAKNTLYLQMNSLRPEDTAVYYCVKGSTAIVGVPPTYPDEYDYWGQCTLVTVSS

SEQ ID NO: 1000 - protein, 127 aa, Artificial Sequence
  An artificially synthesized sequence
EVQLVESGGGLVQPGGSLRLSCAASGFTFDDYGMSWVRQAPGKALEWVSAISWNGNNTYYTESMKGRFTISRDNAKNTLYLQMNSLRPEDTAVYYCVKGSTAIVGVPPTYPDEYDYWGQGCLVTVSS

SEQ ID NO: 1001 - protein, 127 aa, Artificial Sequence
  An artificially synthesized sequence
EVQLVESGGGLVQPGGSLRLSCAASGFTFDDYGMSWVRQAPGKALEWVSAISWNGNNTYYTESMKGRFTISRDNAKNTLYLQMNSLRPEDTAVYYCVKGSTAIVGVPPTYPDEYDYWGQGTCVTVSS

SEQ ID NO: 1002 - protein, 127 aa, Artificial Sequence
  An artificially synthesized sequence
EVQLVESGGGLVQPGGSLRLSCAASGFTFDDYGMSWVRQAPGKALEWVSAISWNGNNTYYTESMKGRFTISRDNAKNTLYLQMNSLRPEDTAVYYCVKGSTAIVGVPPTYPDEYDYWGQGTLCTVSS

SEQ ID NO: 1003 - protein, 127 aa, Artificial Sequence
  An artificially synthesized sequence
EVQLVESGGGLVQPGGSLRLSCAASGFTFDDYGMSWVRQAPGKALEWVSAISWNGNNTYYTESMKGRFTISRDNAKNTLYLQMNSLRPEDTAVYYCVKGSTAIVGVPPTYPDEYDYWGQGTLVCVSS

SEQ ID NO: 1004 - protein, 127 aa, Artificial Sequence
  An artificially synthesized sequence
EVQLVESGGGLVQPGGSLRLSCAASGFTFDDYGMSWVRQAPGKALEWVSAISWNGNNTYYTESMKGRFTISRDNAKNTLYLQMNSLRPEDTAVYYCVKGSTAIVGVPPTYPDEYDYWGQGTLVTCSS

SEQ ID NO: 1005 - protein, 127 aa, Artificial Sequence
  An artificially synthesized sequence
EVQLVESGGGLVQPGGSLRLSCAASGFTFDDYGMSWVRQAPGKALEWVSAISWNGNNTYYTESMKGRFTISRDNAKNTLYLQMNSLRPEDTAVYYCVKGSTAIVGVPPTYPDEYDYWGQGTLVTVCS

SEQ ID NO: 1006 - protein, 127 aa, Artificial Sequence
  An artificially synthesized sequence
EVQLVESGGGLVQPGGSLRLSCAASGFTFDDYGMSWVRQAPGKALEWVSAISWNGNNTYYTESMKGRFTISRDNAKNTLYLQMNSLRPEDTAVYYCVKGSTAIVGVPPTYPDEYDYWGQGTLVTVSC

SEQ ID NO: 1007 - protein, 447 aa, Artificial Sequence
  An artificially synthesized sequence
QVQLQQSGAELARPGASVKMSCKASGYTFTRYTMHWVKQRPGQGLEWIGYINPSRGYTNYNQKFKDKATLTTDKSSSTAYMQLSSLTSEDSAVYYCARYYDDHYSLDYWGQGTTLTVSSASTKGPSVFPLAPSSKSTSGGTAALGCLVKDYFPEPVTVSWNSGALTSGVHTFPAVLQSSGLYSLSSVVTVPSSSLGTQTYICNVNHKPSNTKVDKRVEPKSCDKTHTCPPCPAPELRRGPSVFLFPPKPKDTLMISRTPEVTCVVVDVSHEDPEVKFNWYVDGVEVHNAKTKPREEQYNSTYRVVSVLTVLHQDWLNGKEYKCKVSNKGLPSSIEKTISKAKGQPREPQVYTLPPSREEMTKNQVSLTCLVKGFYPSDIAVEWESNGQPENNYKTTPPVLDSDGSFFLYSKLTVDKSRWQEGNVFSCSVMHEALHNHYTQKSLSLSP

SEQ ID NO: 1008 - protein, 213 aa, Artificial Sequence
  An artificially synthesized sequence
QIVLTQSPAIMSASPGEKVTMTCSASSSVSYMNWYQQKSGTSPKRWIYDTSKLASGVPAHFRGSGSGTSYSLTISGMEAEDAATYYCQQWSSNPFTFGSGTKLEIKRTVAAPSVFIFPPSDEQLKSGTASVVCLLNNFYPREAKVQWKVDNALQSGNSQESVTEQDSKDSTYSLSSTLTLSKADYEKHKVYACEVTHQGLSSPVTKSFNRGEC

SEQ ID NO: 1009 - protein, 328 aa, Artificial Sequence; identical to SEQ ID NO: 18
  An artificially synthesized sequence

SEQ ID NO: 1010 - protein, 119 aa, Artificial Sequence
  An artificially synthesized sequence
QVQLQQSGAELARPGASVKMSCKASGYTFTRYTMHWVKQRPGQGLEWIGYINPSRGYTNYNQKFKDKATLTTDKSSSTAYMQLSSLTSEDSAVYYCARYYDDHYSLDYWGQGTTLTVSS

SEQ ID NO: 1011 - protein, 107 aa, Artificial Sequence [sequence omitted]

SEQ ID NO: 1012 - protein, 106 aa, Artificial Sequence [sequence omitted]

SEQ ID NO: 1013 - protein, 444 aa, Artificial Sequence
  An artificially synthesized sequence
QVQLQQSGPQLVRPGASVKISCKASGYSFTSYWMHWVNQRPGQGLEWIGMIDPSYSETRLNQKFKDKATLTVDKSSSTAYMQLSSPTSEDSAVYYCALYGNYFDYWGQGTTLTVSSASTKGPSVFPLAPSSKSTSGGTAALGCLVKDYFPEPVTVSWNSGALTSGVHTFPAVLQSSGLYSLSSVVTVPSSSLGTQTYICNVNHKPSNTKVDKRVEPKSCDKTHTCPPCPAPELRRGPSVFLFPPKPKDTLMISRTPEVTCVVVDVSHEDPEVKFNWYVDGVEVHNAKTKPREEQYNSTYRVVSVLTVLHQDWLNGKEYKCKVSNKGLPSSIEKTISKAKGQPREPQVYTLPPSREEMTKNQVSLTCLVKGFYPSDIAVEWESNGQPENNYKTTPPVLDSDGSFFLYSKLTVDKSRWQEGNVFSCSVMHEALHNHYTQKSLSLSP

SEQ ID NO: 1014 - protein, 214 aa, Artificial Sequence
  An artificially synthesized sequence
DIQMTQSSSSFSVSLGDRVTITCKASEDIYNRLAWYQQKPGNAPRLLISGATSLETGVPSRFSGSGSGKDYTLSITSLQTEDVATYYCQQYWSTPYTFGGGTKLEVKRTVAAPSVFIFPPSDEQLKSGTASVVCLLNNFYPREAKVQWKVDNALQSGNSQESVTEQDSKDSTYSLSSTLTLSKADYEKHKVYACEVTHQGLSSPVTKSFNRGEC

SEQ ID NO: 1015 - protein, 328 aa, Artificial Sequence
  An artificially synthesized sequence
ASTKGPSVFPLAPSSKSTSGGTAALGCLVKDYFPEPVTVSWNSGALTSGVHTFPAVLQSSGLYSLSSVVTVPSSSLGTQTYICNVNHKPSNTKVDKRVEPKSCDKTHTCPPCPAPELRRGPSVFLFPPKPKDTLMISRTPEVTCVVVDVSHEDPEVKFNWYVDGVEVHNAKTKPREEQYNSTYRVVSVLTVLHQDWLNGKEYKCKVSNKGLPSSIEKTISKAKGQPREPQVCTLPPSREEMTKNQVSLWCLVKGFYPSDIAVEWESNGQPENNYKTTPPVLDSDGSFFLYSKLTVDKSRWQEGNVFSCSVMHEALHNHYTQKSLSLSP

SEQ ID NO: 1016 - protein, 328 aa, Artificial Sequence
  An artificially synthesized sequence
ASTKGPSVFPLAPSSKSTSGGTAALGCLVKDYFPEPVTVSWNSGALTSGVHTFPAVLQSSGLYSLSSVVTVPSSSLGTQTYICNVNHKPSNTKVDKRVEPKSCDKTHTCPPCPAPELRRGPSVFLFPPKPKDTLMISRTPEVTCVVVDVSHEDPEVKFNWYVDGVEVHNAKTKPREEQYNSTYRVVSVLTVLHQDWLNGKEYKCKVSNKGLPSSIEKTISKAKGQPREPQVYTLPPSRCEMTKNQVSLSCAVKGFYPSDIAVEWESNGQPENNYKTTPPVLDSDGSFFLVSKLTVDKSRWQEGNVFSCSVMHEALHNHYTQKSLSLSP

SEQ ID NO: 1017 - protein, 328 aa, Artificial Sequence; identical to SEQ ID NO: 88
  An artificially synthesized sequence

SEQ ID NO: 1018 - protein, 328 aa, Artificial Sequence; identical to SEQ ID NO: 89
  An artificially synthesized sequence

SEQ ID NO: 1019 - protein, 328 aa, Artificial Sequence; identical to SEQ ID NO: 128
  An artificially synthesized sequence

SEQ ID NO: 1020 - protein, 107 aa, Artificial Sequence; identical to SEQ ID NO: 231
  An artificially synthesized sequence

SEQ ID NO: 1021 - protein, 107 aa, Artificial Sequence; identical to SEQ ID NO: 298
  An artificially synthesized sequence

SEQ ID NO: 1022 - protein, 328 aa, Artificial Sequence
  An artificially synthesized sequence
ASTKGPSVFPLAPSSKSTSGGTAALGCLVKDYFPEPVTVSWNSGALTSGVHTFPAVLQSSGLYSLSSVVTVPSCSLGTQTYICNVNHKPSNTKVDKRVEPKSCDKTHTCPPCPAPELRRGPSVFLFPPKPKDTLMISRTPEVTCVVVDVSHEDPEVKFNWYVDGVEVHNAKTKPREEQYNSTYRVVSVLTVLHQDWLNGKEYKCKVSNKGLPSSIEKTISKAKGQPREPQVCTLPPSREEMTKNQVSLWCLVKGFYPSDIAVEWESNGQPENNYKTTPPVLDSDGSFFLYSKLTVDKSRWQEGNVFSCSVMHEALHNHYTQKSLSLSP

SEQ ID NO: 1023 - protein, 328 aa, Artificial Sequence
  An artificially synthesized sequence
ASTKGPSVFPLAPSSKSTSGGTAALGCLVKDYFPEPVTVSWNSGALTSGVHTFPAVLQSSGLYSLSSVVTCPSSSLGTQTYICNVNHKPSNTKVDKRVEPKSCDKTHTCPPCPAPELRRGPSVFLFPPKPKDTLMISRTPEVTCVVVDVSHEDPEVKFNWYVDGVEVHNAKTKPREEQYNSTYRVVSVLTVLHQDWLNGKEYKCKVSNKGLPSSIEKTISKAKGQPREPQVYTLPPSRCEMTKNQVSLSCAVKGFYPSDIAVEWESNGQPENNYKTTPPVLDSDGSFFLVSKLTVDKSRWQEGNVFSCSVMHEALHNHYTQKSLSLSP

SEQ ID NO: 1024 - protein, 328 aa, Artificial Sequence
  An artificially synthesized sequence
ASTKGPSVFPLAPSSKSTSGGTAALGCLVKDYFPEPVTVSWNSGALTSGVHTFPAVLQSSGLYSLSSVVTVCSSSLGTQTYICNVNHKPSNTKVDKRVEPKSCDKTHTCPPCPAPELRRGPSVFLFPPKPKDTLMISRTPEVTCVVVDVSHEDPEVKFNWYVDGVEVHNAKTKPREEQYNSTYRVVSVLTVLHQDWLNGKEYKCKVSNKGLPSSIEKTISKAKGQPREPQVYTLPPSRCEMTKNQVSLSCAVKGFYPSDIAVEWESNGQPENNYKTTPPVLDSDGSFFLVSKLTVDKSRWQEGNVFSCSVMHEALHNHYTQKSLSLSP

SEQ ID NO: 1025 - protein, 328 aa, Artificial Sequence
  An artificially synthesized sequence
ASTKGPSVFPLAPSSKSTSGGTAALGCLVKDYFPEPVTVSWNSGALTSGVHTFPAVLQSSGLYSLSSVVTVPCSSLGTQTYICNVNHKPSNTKVDKRVEPKSCDKTHTCPPCPAPELRRGPSVFLFPPKPKDTLMISRTPEVTCVVVDVSHEDPEVKFNWYVDGVEVHNAKTKPREEQYNSTYRVVSVLTVLHQDWLNGKEYKCKVSNKGLPSSIEKTISKAKGQPREPQVYTLPPSRCEMTKNQVSLSCAVKGFYPSDIAVEWESNGQPENNYKTTPPVLDSDGSFFLVSKLTVDKSRWQEGNVFSCSVMHEALHNHYTQKSLSLSP

SEQ ID NO: 1026 - protein, 328 aa, Artificial Sequence
  An artificially synthesized sequence
ASTKGPSVFPLAPSSKSTSGGTAALGCLVKDYFPEPVTVSWNSGALTSGVHTFPAVLQSSGLYSLSSVVTVPSCSLGTQTYICNVNHKPSNTKVDKRVEPKSCDKTHTCPPCPAPELRRGPSVFLFPPKPKDTLMISRTPEVTCVVVDVSHEDPEVKFNWYVDGVEVHNAKTKPREEQYNSTYRVVSVLTVLHQDWLNGKEYKCKVSNKGLPSSIEKTISKAKGQPREPQVYTLPPSRCEMTKNQVSLSCAVKGFYPSDIAVEWESNGQPENNYKTTPPVLDSDGSFFLVSKLTVDKSRWQEGNVFSCSVMHEALHNHYTQKSLSLSP

SEQ ID NO: 1027 - protein, 328 aa, Artificial Sequence
  An artificially synthesized sequence
ASTKGPSVFPLAPSSKSTSGGTAALGCLVKDYFPEPVTVSWNSGALTSGVHTFPAVLQSSGLYSLSSVVTVPSSCLGTQTYICNVNHKPSNTKVDKRVEPKSCDKTHTCPPCPAPELRRGPSVFLFPPKPKDTLMISRTPEVTCVVVDVSHEDPEVKFNWYVDGVEVHNAKTKPREEQYNSTYRVVSVLTVLHQDWLNGKEYKCKVSNKGLPSSIEKTISKAKGQPREPQVYTLPPSRCEMTKNQVSLSCAVKGFYPSDIAVEWESNGQPENNYKTTPPVLDSDGSFFLVSKLTVDKSRWQEGNVFSCSVMHEALHNHYTQKSLSLSP

SEQ ID NO: 1028 - protein, 328 aa, Artificial Sequence
  An artificially synthesized sequence
ASTKGPSVFPLAPSSKSTSGGTAALGCLVKDYFPEPVTVSWNSGALTSGVHTFPAVLQSSGLYSLSSVVTVPSSSCGTQTYICNVNHKPSNTKVDKRVEPKSCDKTHTCPPCPAPELRRGPSVFLFPPKPKDTLMISRTPEVTCVVVDVSHEDPEVKFNWYVDGVEVHNAKTKPREEQYNSTYRVVSVLTVLHQDWLNGKEYKCKVSNKGLPSSIEKTISKAKGQPREPQVYTLPPSRCEMTKNQVSLSCAVKGFYPSDIAVEWESNGQPENNYKTTPPVLDSDGSFFLVSKLTVDKSRWQEGNVFSCSVMHEALHNHYTQKSLSLSP

SEQ ID NO: 1029 - protein, 328 aa, Artificial Sequence
  An artificially synthesized sequence
ASTKGPSVFPLAPSSKSTSGGTAALGCLVKDYFPEPVTVSWNSGALTSGVHTFPAVLQSSGLYSLSSVVTVPSSSLCTQTYICNVNHKPSNTKVDKRVEPKSCDKTHTCPPCPAPELRRGPSVFLFPPKPKDTLMISRTPEVTCVVVDVSHEDPEVKFNWYVDGVEVHNAKTKPREEQYNSTYRVVSVLTVLHQDWLNGKEYKCKVSNKGLPSSIEKTISKAKGQPREPQVYTLPPSRCEMTKNQVSLSCAVKGFYPSDIAVEWESNGQPENNYKTTPPVLDSDGSFFLVSKLTVDKSRWQEGNVFSCSVMHEALHNHYTQKSLSLSP

SEQ ID NO: 1030 - protein, 328 aa, Artificial Sequence
  An artificially synthesized sequence
ASTKGPSVFPLAPSSKRRRRGTAALGCLVKDYFPEPVTVSWNSGALTSGVHTFPAVLQSSGLYSLSSVVTVPSRRRRRRTYICNVNHKPSNTKVDKRVEPKSCDKTHTCPPCPAPELRRGPSVFLFPPKPKDTLMISRTPEVTCVVVDVSHEDPEVKFNWYVDGVEVHNAKTKPREEQYNSTYRVVSVLTVLHQDWLNGKEYKCKVSNKGLPSSIEKTISKAKGQPREPQVCTLPPSREEMTKNQVSLWCLVKGFYPSDIAVEWESNGQPENNYKTTPPVLDSDGSFFLYSKLTVDKSRWQEGNVFSCSVMHEALHNHYTQKSLSLSP

SEQ ID NO: 1031 - protein, 328 aa, Artificial Sequence
  An artificially synthesized sequence
ASTKGPSVFPLAPSSKDDDDGTAALGCLVKDYFPEPVTVSWNSGALTSGVHTFPAVLQSSGLYSLSSVVTVPSDDDDDDTYICNVNHKPSNTKVDKRVEPKSCDKTHTCPPCPAPELRRGPSVFLFPPKPKDTLMISRTPEVTCVVVDVSHEDPEVKFNWYVDGVEVHNAKTKPREEQYNSTYRVVSVLTVLHQDWLNGKEYKCKVSNKGLPSSIEKTISKAKGQPREPQVYTLPPSRCEMTKNQVSLSCAVKGFYPSDIAVEWESNGQPENNYKTTPPVLDSDGSFFLVSKLTVDKSRWQEGNVFSCSVMHEALHNHYTQKSLSLSP

SEQ ID NO: 1032 - protein, 328 aa, Artificial Sequence
  An artificially synthesized sequence
ASTKGPSVFPLAPSSKEEEEGTAALGCLVKDYFPEPVTVSWNSGALTSGVHTFPAVLQSSGLYSLSSVVTVPSEEEEEETYICNVNHKPSNTKVDKRVEPKSCDKTHTCPPCPAPELRRGPSVFLFPPKPKDTLMISRTPEVTCVVVDVSHEDPEVKFNWYVDGVEVHNAKTKPREEQYNSTYRVVSVLTVLHQDWLNGKEYKCKVSNKGLPSSIEKTISKAKGQPREPQVYTLPPSRCEMTKNQVSLSCAVKGFYPSDIAVEWESNGQPENNYKTTPPVLDSDGSFFLVSKLTVDKSRWQEGNVFSCSVMHEALHNHYTQKSLSLSP

SEQ ID NO: 1033 - protein, 328 aa, Artificial Sequence
  An artificially synthesized sequence
ASTKGPSVFPLAPSSKSTSGGTAALGCLVKDYFPEPVTVSWNSGALTSGVHTFPAVLQSSGLYSLSSVVTVPSSSLGTQTYICNVNHKPSNTKVDKRVEPKSCDKTHTSPPCPAPELRRGPSVFLFPPKPKDTLMISRTPEVTCVVVDVSHEDPEVKFNWYVDGVEVHNAKTKPREEQYNSTYRVVSVLTVLHQDWLNGKEYKCKVSNKGLPSSIEKTISKAKGQPREPQVYTLPPSREEMTKNQVSLTCLVKGFYPSDIAVEWESNGQPENNYKTTPPVLDSDGSFFLYSKLTVDKSRWQEGNVFSCSVMHEALHNHYTQKSLSLSP

SEQ ID NO: 1034 - protein, 328 aa, Artificial Sequence
  An artificially synthesized sequence
ASTKGPSVFPLAPSSKSTSGGTAALGCLVKDYFPEPVTVSWNSGALTSGVHTFPAVLQSSGLYSLSSVVTVPSSSLGTQTYICNVNHKPSNTKVDKRVEPKSCDKTHTCPPSPAPELRRGPSVFLFPPKPKDTLMISRTPEVTCVVVDVSHEDPEVKFNWYVDGVEVHNAKTKPREEQYNSTYRVVSVLTVLHQDWLNGKEYKCKVSNKGLPSSIEKTISKAKGQPREPQVYTLPPSREEMTKNQVSLTCLVKGFYPSDIAVEWESNGQPENNYKTTPPVLDSDGSFFLYSKLTVDKSRWQEGNVFSCSVMHEALHNHYTQKSLSLSP

SEQ ID NO: 1035 - protein, 328 aa, Artificial Sequence
  An artificially synthesized sequence
ASTKGPSVFPLAPSSKSTSGGTAALGCLVKDYFPEPVTVSWNSGALTSGVHTFPAVLQSSGLYSLSSVVTVPSSSLGTQTYICNVNHKPSNTKVDKRVEPKSCDKTHTSPPSPAPELRRGPSVFLFPPKPKDTLMISRTPEVTCVVVDVSHEDPEVKFNWYVDGVEVHNAKTKPREEQYNSTYRVVSVLTVLHQDWLNGKEYKCKVSNKGLPSSIEKTISKAKGQPREPQVYTLPPSREEMTKNQVSLTCLVKGFYPSDIAVEWESNGQPENNYKTTPPVLDSDGSFFLYSKLTVDKSRWQEGNVFSCSVMHEALHNHYTQKSLSLSP

SEQ ID NO: 1036 - protein, 328 aa, Artificial Sequence
  An artificially synthesized sequence
ASTKGPSVFPLAPSSKSTSGGTAALGCLVKDYFPEPVTVSWNSGALTSGVHTFPAVLQSSGLYSLSSVVTVPSCSLGTQTYICNVNHKPSNTKVDKRVEPKSCDKTHTSPPCPAPELRRGPSVFLFPPKPKDTLMISRTPEVTCVVVDVSHEDPEVKFNWYVDGVEVHNAKTKPREEQYNSTYRVVSVLTVLHQDWLNGKEYKCKVSNKGLPSSIEKTISKAKGQPREPQVYTLPPSREEMTKNQVSLTCLVKGFYPSDIAVEWESNGQPENNYKTTPPVLDSDGSFFLYSKLTVDKSRWQEGNVFSCSVMHEALHNHYTQKSLSLSP

SEQ ID NO: 1037 - protein, 328 aa, Artificial Sequence
  An artificially synthesized sequence
ASTKGPSVFPLAPSSKSTSGGTAALGCLVKDYFPEPVTVSWNSGALTSGVHTFPAVLQSSGLYSLSSVVTVPSCSLGTQTYICNVNHKPSNTKVDKRVEPKSCDKTHTCPPSPAPELRRGPSVFLFPPKPKDTLMISRTPEVTCVVVDVSHEDPEVKFNWYVDGVEVHNAKTKPREEQYNSTYRVVSVLTVLHQDWLNGKEYKCKVSNKGLPSSIEKTISKAKGQPREPQVYTLPPSREEMTKNQVSLTCLVKGFYPSDIAVEWESNGQPENNYKTTPPVLDSDGSFFLYSKLTVDKSRWQEGNVFSCSVMHEALHNHYTQKSLSLSP

SEQ ID NO: 1038 - protein, 328 aa, Artificial Sequence
  An artificially synthesized sequence
ASTKGPSVFPLAPSSKSTSGGTAALGCLVKDYFPEPVTVSWNSGALTSGVHTFPAVLQSSGLYSLSSVVTVPSCSLGTQTYICNVNHKPSNTKVDKRVEPKSCDKTHTSPPSPAPELRRGPSVFLFPPKPKDTLMISRTPEVTCVVVDVSHEDPEVKFNWYVDGVEVHNAKTKPREEQYNSTYRVVSVLTVLHQDWLNGKEYKCKVSNKGLPSSIEKTISKAKGQPREPQVYTLPPSREEMTKNQVSLTCLVKGFYPSDIAVEWESNGQPENNYKTTPPVLDSDGSFFLYSKLTVDKSRWQEGNVFSCSVMHEALHNHYTQKSLSLSP

SEQ ID NO: 1039 - protein, 450 aa, Artificial Sequence
  An artificially synthesized sequence
QVQLVESGGGVVQPGGSLRLSCAASGFTFSNAWMHWVRQAPGKGLEWVAQIKDKSQNYATYVAESVKGRFTISRADSKNSIYLQMNSLKTEDTAVYYCRYVHYAAGYGVDIWGQGTTVTVSSASTKGPSVFPLAPSSKSTSGGTAALGCLVKDYFPEPVTVSWNSGALTSGVHTFPAVLQSSGLYSLSSVVTVPSSSLGTQTYICNVNHKPSNTKVDKKVEPKSCDKTHTCPPCPAPELRGGPKVFLFPPKPKDTLMISRTPEVTCVVVDVSHEDPEVKFNWYVDGVEVHNAKTKPREEQYASTYRVVSVLTVLHQDWLNGKEYKCKVSNKALPAPIEKTISKAKGQPREPQVYTLPPSREEMTKNQVSLTCLVKGFYPSDIAVEWESNGQPENNYKTTPPYLDSDGSFFLYSKLTVDKSRWQQGNVFSCSVMHEALHNHYTQESLSLSP

SEQ ID NO: 1040 - protein, 219 aa, Artificial Sequence; identical to SEQ ID NO: 11
  An artificially synthesized sequence

SEQ ID NO: 1041 - protein, 450 aa, Artificial Sequence; identical to SEQ ID NO: 1039
  An artificially synthesized sequence

SEQ ID NO: 1042 - protein, 219 aa, Artificial Sequence; identical to SEQ ID NO: 10
  An artificially synthesized sequence

SEQ ID NO: 1043 - protein, 447 aa, Artificial Sequence; identical to SEQ ID NO: 5
  An artificially synthesized sequence

SEQ ID NO: 1044 - protein, 213 aa, Artificial Sequence; identical to SEQ ID NO: 12
  An artificially synthesized sequence

SEQ ID NO: 1045 - protein, 450 aa, Artificial Sequence
  An artificially synthesized sequence
QVQLVESGGGVVQPGGSLRLSCAASGFTFSNAWMHWVRQAPGKGLEWVAQIKDKSQNYATYVAESVKGRFTISRADSKNSIYLQMNSLKTEDTAVYYCRYVHYAAGYGVDIWGQGTTVTVSSASTKGPSVFPLAPSSKSTSGGTAALGCLVKDYFPEPVTVSWNSGALTSGVHTFPAVLQSSGLYSLSSVVTVPSCSLGTQTYICNVNHKPSNTKVDKKVEPKSCDKTHTCPPCPAPELRGGPKVFLFPPKPKDTLMISRTPEVTCVVVDVSHEDPEVKFNWYVDGVEVHNAKTKPREEQYASTYRVVSVLTVLHQDWLNGKEYKCKVSNKALPAPIEKTISKAKGQPREPQVYTLPPSREEMTKNQVSLTCLVKGFYPSDIAVEWESNGQPENNYKTTPPYLDSDGSFFLYSKLTVDKSRWQQGNVFSCSVMHEALHNHYTQESLSLSP

SEQ ID NO: 1046 - protein, 219 aa, Artificial Sequence; identical to SEQ ID NO: 10
  An artificially synthesized sequence

SEQ ID NO: 1047 - protein, 447 aa, Artificial Sequence; identical to SEQ ID NO: 8
  An artificially synthesized sequence

SEQ ID NO: 1048 - protein, 213 aa, Artificial Sequence; identical to SEQ ID NO: 12
  An artificially synthesized sequence

SEQ ID NO: 1049 - protein, 450 aa, Artificial Sequence; identical to SEQ ID NO: 1039
  An artificially synthesized sequence

SEQ ID NO: 1050 - protein, 219 aa, Artificial Sequence; identical to SEQ ID NO: 11
  An artificially synthesized sequence

SEQ ID NO: 1051 - protein, 447 aa, Artificial Sequence; identical to SEQ ID NO: 8
  An artificially synthesized sequence

SEQ ID NO: 1052 - protein, 213 aa, Artificial Sequence; identical to SEQ ID NO: 12
  An artificially synthesized sequence

SEQ ID NO: 1053 - protein, 447 aa, Artificial Sequence; identical to SEQ ID NO: 5
  An artificially synthesized sequence

SEQ ID NO: 1054 - protein, 213 aa, Artificial Sequence; identical to SEQ ID NO: 12
  An artificially synthesized sequence

SEQ ID NO: 1055 - protein, 447 aa, Artificial Sequence; identical to SEQ ID NO: 8
  An artificially synthesized sequence

SEQ ID NO: 1056 - protein, 213 aa, Artificial Sequence; identical to SEQ ID NO: 12
  An artificially synthesized sequence

SEQ ID NO: 1057 - protein, 450 aa, Artificial Sequence; identical to SEQ ID NO: 1039
  An artificially synthesized sequence

SEQ ID NO: 1058 - protein, 219 aa, Artificial Sequence; identical to SEQ ID NO: 11
  An artificially synthesized sequence

SEQ ID NO: 1059 - protein, 447 aa, Artificial Sequence; identical to SEQ ID NO: 5
  An artificially synthesized sequence

SEQ ID NO: 1060 - protein, 213 aa, Artificial Sequence; identical to SEQ ID NO: 12
  An artificially synthesized sequence

SEQ ID NO: 1061-1112 - skipped (52 entries)

SEQ ID NO: 1113 - protein, 447 aa, Artificial Sequence; identical to SEQ ID NO: 5
  An artificially synthesized sequence

SEQ ID NO: 1114 - protein, 213 aa, Artificial Sequence; identical to SEQ ID NO: 12
  An artificially synthesized sequence

SEQ ID NO: 1115 - protein, 456 aa, Artificial Sequence
  An artificially synthesized sequence
QVQLQESGPGVVKPSGTLSLTCAISGGSIGSGGSIRSTRWWSWVRQSPGKGLEWIGEIYHSGSTNYNPSLKSRVTISLDKSRNHFSLRLNSVTAADTAVYYCARQDYGDSGDWYFDLWGKGTMVTVSSASTKGPSVFPLAPSSKSTSGGTAALGCLVKDYFPEPVTVSWNSGALTSGVHTFPAVLQSSGLYSLSSVVTVPSSSLGTQTYICNVNHKPSNTKVDKKVEPKSCDKTHTCPPCPAPELRGGPKVFLFPPKPKDTLMISRTPEVTCVVVDVSHEDPEVKFNWYVDGVEVHNAKTKPREEQYASTYRVVSVLTVLHQDWLNGKEYKCKVSNKALPAPIEKTISKAKGQPREPQVYTLPPSREEMTKNQVSLTCLVKGFYPSDIAVEWESNGQPENNYKTTPPYLDSDGSFFLYSKLTVDKSRWQQGNVFSCSVMHEALHNHYTQESLSLSP

SEQ ID NO: 1116 - protein, 217 aa, Artificial Sequence
  An artificially synthesized sequence
NFMLTQPHSVSESPGKTVTISCTRSSGSIASNSVQWYQQRPGSSPTTVIYEDNQRPSGVPDRFSGSIDSSSNSASLTVSGLKTEDEADYYCQSSDSSAVVFGSGTKLTVLRTVAAPSVFIFPPSDEQLKSGTASVVCLLNNFYPREAKVQWKVDNALQSGNSQESVTEQDSKDSTYSLSSTLTLSKADYEKHKVYACEVTHQGLSSPVTKSFNRGEC

SEQ ID NO: 1117 - protein, 447 aa, Artificial Sequence; identical to SEQ ID NO: 5
  An artificially synthesized sequence

SEQ ID NO: 1118 - protein, 213 aa, Artificial Sequence
  An artificially synthesized sequence
QIVLTQSPAIMSASPGEKVTMTCSASSSVSYMNWYQQKSGTSPKRWIYDTSKLASGVPAHFRGSGSGTSYSLTISGMEAEDAATYYCQQWSSNPFTFGSGTKLEINRTVAAPSVFIFPPSDEQLCSGTASVVCLLNNFYPREAKVQWKVDNALQSGNSQESVTEQDSKDSTYSLSSTLTLSKADYEKHKVYACEVTHQGLSSPVTKSFNRGEC

SEQ ID NO: 1119 - protein, 456 aa, Artificial Sequence; identical to SEQ ID NO: 1115
  An artificially synthesized sequence

SEQ ID NO: 1120 - protein, 217 aa, Artificial Sequence
  An artificially synthesized sequence
NFMLTQPHSVSESPGKTVTISCTRSSGSIASNSVQWYQQRPGSSPTTVIYEDNQRPSGVPDRFSGSIDSSSNSASLTVSGLKTEDEADYYCQSSDSSAVVFGSGTKLTVLRTVAAPSVFIFPPSDEQLCSGTASVVCLLNNFYPREAKVQWKVDNALQSGNSQESVTEQDSKDSTYSLSSTLTLSKADYEKHKVYACEVTHQGLSSPVTKSFNRGEC

SEQ ID NO: 1121 - protein, 447 aa, Artificial Sequence; identical to SEQ ID NO: 8
  An artificially synthesized sequence

SEQ ID NO: 1122 - protein, 213 aa, Artificial Sequence; identical to SEQ ID NO: 12
  An artificially synthesized sequence

SEQ ID NO: 1123 - protein, 456 aa, Artificial Sequence
  An artificially synthesized sequence
QVQLQESGPGVVKPSGTLSLTCAISGGSIGSGGSIRSTRWWSWVRQSPGKGLEWIGEIYHSGSTNYNPSLKSRVTISLDKSRNHFSLRLNSVTAADTAVYYCARQDYGDSGDWYFDLWGKGTMVTVSSASTKGPSVFPLAPSSKSTSGGTAALGCLVKDYFPEPVTVSWNSGALTSGVHTFPAVLQSSGLYSLSSVVTVPSCSLGTQTYICNVNHKPSNTKVDKKVEPKSCDKTHTCPPCPAPELRGGPKVFLFPPKPKDTLMISRTPEVTCVVVDVSHEDPEVKFNWYVDGVEVHNAKTKPREEQYASTYRVVSVLTVLHQDWLNGKEYKCKVSNKALPAPIEKTISKAKGQPREPQVYTLPPSREEMTKNQVSLTCLVKGFYPSDIAVEWESNGQPENNYKTTPPYLDSDGSFFLYSKLTVDKSRWQQGNVFSCSVMHEALHNHYTQESLSLSP

SEQ ID NO: 1124 - protein, 217 aa, Artificial Sequence; identical to SEQ ID NO: 1116
  An artificially synthesized sequence

SEQ ID NO: 1125 - protein, 447 aa, Artificial Sequence; identical to SEQ ID NO: 8
  An artificially synthesized sequence

SEQ ID NO: 1126 - protein, 213 aa, Artificial Sequence; identical to SEQ ID NO: 12
  An artificially synthesized sequence

SEQ ID NO: 1127 - protein, 456 aa, Artificial Sequence; identical to SEQ ID NO: 1115
  An artificially synthesized sequence

SEQ ID NO: 1128 - protein, 217 aa, Artificial Sequence; identical to SEQ ID NO: 1120
  An artificially synthesized sequence

SEQ ID NO: 1129 - protein, 447 aa, Artificial Sequence; identical to SEQ ID NO: 5
  An artificially synthesized sequence

SEQ ID NO: 1130 - protein, 213 aa, Artificial Sequence; identical to SEQ ID NO: 12
  An artificially synthesized sequence

SEQ ID NO: 1131 - protein, 448 aa, Artificial Sequence
  An artificially synthesized sequence
DVQLQESGPGLVKPSQSLSLTCTVTGYSITSDYAWNWIRQFPGNKLEWMGYINYSGSTSYNPSLKSRISITRDTSKNQFFLQLNSVTTEDTATYYCARWIGSSAWYFDVWGAGTTVTVSSASTKGPSVFPLAPSSKSTSGGTAALGCLVKDYFPEPVTVSWNSGALTSGVHTFPAVLQSSGLYSLSSVVTVPSSSLGTQTYICNVNHKPSNTKVDKKVEPKSCDKTHTCPPCPAPELRGGPKVFLFPPKPKDTLMISRTPEVTCVVVDVSHEDPEVKFNWYVDGVEVHNAKTKPREEQYASTYRVVSVLTVLHQDWLNGKEYKCKVSNKALPAPIEKTISKAKGQPREPQVYTLPPSREEMTKNQVSLTCLVKGFYPSDIAVEWESNGQPENNYKTTPPYLDSDGSFFLYSKLTVDKSRWQQGNVFSCSVMHEALHNHYTQESLSLSP

SEQ ID NO: 1132 - protein, 219 aa, Artificial Sequence
  An artificially synthesized sequence
DVLMTQTPLSLPVSLGDQASISCRSGQNIVHSNGNTYLEWYLQKPGQSPKLLIYKVSNRFFGVPDRISGSGSGTDFTLKISRVEAEDLGVYFCFQGSHVPFTFGSGTKLEIKRTVAAPSVFIFPPSDEQLKSGTASVVCLLNNFYPREAKVQWKVDNALQSGNSQESVTEQDSKDSTYSLSSTLTLSKADYEKHKVYACEVTHQGLSSPVTKSFNRGEC

SEQ ID NO: 1133 - protein, 447 aa, Artificial Sequence; identical to SEQ ID NO: 8
  An artificially synthesized sequence

SEQ ID NO: 1134 - protein, 213 aa, Artificial Sequence; identical to SEQ ID NO: 12
  An artificially synthesized sequence

SEQ ID NO: 1135 - protein, 448 aa, Artificial Sequence
  An artificially synthesized sequence
DVQLQESGPGLVKPSQSLSLTCTVTGYSITSDYAWNWIRQFPGNKLEWMGYINYSGSTSYNPSLKSRISITRDTSKNQFFLQLNSVTTEDTATYYCARWIGSSAWYFDVWGAGTTVTVSSASTKGPSVFPLAPSSKSTSGGTAALGCLVKDYFPEPVTVSWNSGALTSGVHTFPAVLQSSGLYSLSSVVTVPSCSLGTQTYICNVNHKPSNTKVDKKVEPKSCDKTHTCPPCPAPELRGGPKVFLFPPKPKDTLMISRTPEVTCVVVDVSHEDPEVKFNWYVDGVEVHNAKTKPREEQYASTYRVVSVLTVLHQDWLNGKEYKCKVSNKALPAPIEKTISKAKGQPREPQVYTLPPSREEMTKNQVSLTCLVKGFYPSDIAVEWESNGQPENNYKTTPPYLDSDGSFFLYSKLTVDKSRWQQGNVFSCSVMHEALHNHYTQESLSLSP

SEQ ID NO: 1136 - protein, 219 aa, Artificial Sequence; identical to SEQ ID NO: 1132
  An artificially synthesized sequence

SEQ ID NO: 1137 - protein, 447 aa, Artificial Sequence; identical to SEQ ID NO: 8
  An artificially synthesized sequence

SEQ ID NO: 1138 - protein, 213 aa, Artificial Sequence; identical to SEQ ID NO: 12
  An artificially synthesized sequence

SEQ ID NO: 1139 - protein, 448 aa, Artificial Sequence; identical to SEQ ID NO: 1131
  An artificially synthesized sequence

SEQ ID NO: 1140 - protein, 219 aa, Artificial Sequence
  An artificially synthesized sequence
DVLMTQTPLSLPVSLGDQASISCRSGQNIVHSNGNTYLEWYLQKPGQSPKLLIYKVSNRFFGVPDRISGSGSGTDFTLKISRVEAEDLGVYFCFQGSHVPFTFGSGTKLEIKRTVAAPSVFIFPPSDEQLCSGTASVVCLLNNFYPREAKVQWKVDNALQSGNSQESVTEQDSKDSTYSLSSTLTLSKADYEKHKVYACEVTHQGLSSPVTKSFNRGEC

SEQ ID NO: 1141 - protein, 450 aa, Artificial Sequence; identical to SEQ ID NO: 4
  An artificially synthesized sequence

SEQ ID NO: 1142 - protein, 219 aa, Artificial Sequence; identical to SEQ ID NO: 10
  An artificially synthesized sequence

SEQ ID NO: 1143 - protein, 448 aa, Artificial Sequence
  An artificially synthesized sequence
QVQLQQSGAELVKPGASVKMSCKAFGYTFTTYPIEWMKQNHGKSLEWIGNFHPYNDDTKYNEKFKGKAKLTVEKSSTTVYLELSRLTSDDSAVYYCARENYGSHGGFVYWGQGTLVTVSSASTKGPSVFPLAPSSKSTSGGTAALGCLVKDYFPEPVTVSWNSGALTSGVHTFPAVLQSSGLYSLSSVVTVPSSSLGTQTYICNVNHKPSNTKVDKKVEPKSCDKTHTCPPCPAPELRGGPKVFLFPPKPKDTLMISRTPEVTCVVVDVSHEDPEVKFNWYVDGVEVHNAKTKPREEQYASTYRVVSVLTVLHQDWLNGKEYKCKVSNKALPAPIEKTISKAKGQPREPQVYTLPPSREEMTKNQVSLTCLVKGFYPSDIAVEWESNGQPENNYKTTPPYLDSDGSFFLYSKLTVDKSRWQQGNVFSCSVMHEALHNHYTQESLSLSP

SEQ ID NO: 1144 - protein, 215 aa, Artificial Sequence
  An artificially synthesized sequence
ENVLTQSPAIMSASPGEKVTMTCRASSSVISSYLHWYQQKSGASPKLWIYSTSNLASGVPDRFSGSGSGTSYSLTISSVEAEDAATYYCQQYNGYPLTFGAGTKLEIKRTVAAPSVFIFPPSDEQLKSGTASVVCLLNNFYPREAKVQWKVDNALQSGNSQESVTEQDSKDSTYSLSSTLTLSKADYEKHKVYACEVTHQGLSSPVTKSFNRGEC

SEQ ID NO: 1145 - protein, 450 aa, Artificial Sequence; identical to SEQ ID NO: 4
  An artificially synthesized sequence

SEQ ID NO: 1146 - protein, 219 aa, Artificial Sequence; identical to SEQ ID NO: 11
  An artificially synthesized sequence

SEQ ID NO: 1147 - protein, 448 aa, Artificial Sequence; identical to SEQ ID NO: 1143
  An artificially synthesized sequence

SEQ ID NO: 1148 - protein, 215 aa, Artificial Sequence
  An artificially synthesized sequence
ENVLTQSPAIMSASPGEKVTMTCRASSSVISSYLHWYQQKSGASPKLWIYSTSNLASGVPDRFSGSGSGTSYSLTISSVEAEDAATYYCQQYNGYPLTFGAGTKLEIKRTVAAPSVFIFPPSDEQLCSGTASVVCLLNNFYPREAKVQWKVDNALQSGNSQESVTEQDSKDSTYSLSSTLTLSKADYEKHKVYACEVTHQGLSSPVTKSFNRGEC

SEQ ID NO: 1149 - protein, 450 aa, Artificial Sequence; identical to SEQ ID NO: 7
  An artificially synthesized sequence

SEQ ID NO: 1150 - protein, 219 aa, Artificial Sequence; identical to SEQ ID NO: 10
  An artificially synthesized sequence

SEQ ID NO: 1151 - protein, 448 aa, Artificial Sequence
  An artificially synthesized sequence
QVQLQQSGAELVKPGASVKMSCKAFGYTFTTYPIEWMKQNHGKSLEWIGNFHPYNDDTKYNEKFKGKAKLTVEKSSTTVYLELSRLTSDDSAVYYCARENYGSHGGFVYWGQGTLVTVSSASTKGPSVFPLAPSSKSTSGGTAALGCLVKDYFPEPVTVSWNSGALTSGVHTFPAVLQSSGLYSLSSVVTVPSCSLGTQTYICNVNHKPSNTKVDKKVEPKSCDKTHTCPPCPAPELRGGPKVFLFPPKPKDTLMISRTPEVTCVVVDVSHEDPEVKFNWYVDGVEVHNAKTKPREEQYASTYRVVSVLTVLHQDWLNGKEYKCKVSNKALPAPIEKTISKAKGQPREPQVYTLPPSREEMTKNQVSLTCLVKGFYPSDIAVEWESNGQPENNYKTTPPYLDSDGSFFLYSKLTVDKSRWQQGNVFSCSVMHEALHNHYTQESLSLSP

SEQ ID NO: 1152 - protein, 215 aa, Artificial Sequence; identical to SEQ ID NO: 1144
  An artificially synthesized sequence

SEQ ID NO: 1153 - protein, 450 aa, Artificial Sequence; identical to SEQ ID NO: 4
  An artificially synthesized sequence

SEQ ID NO: 1154 - protein, 219 aa, Artificial Sequence; identical to SEQ ID NO: 11
  An artificially synthesized sequence

SEQ ID NO: 1155 - protein, 448 aa, Artificial Sequence; identical to SEQ ID NO: 1151
  An artificially synthesized sequence

SEQ ID NO: 1156 - protein, 215 aa, Artificial Sequence; identical to SEQ ID NO: 1144
  An artificially synthesized sequence

SEQ ID NO: 1157 - protein, 450 aa, Artificial Sequence; identical to SEQ ID NO: 7
  An artificially synthesized sequence

SEQ ID NO: 1158 - protein, 219 aa, Artificial Sequence; identical to SEQ ID NO: 10
  An artificially synthesized sequence

SEQ ID NO: 1159 - protein, 448 aa, Artificial Sequence; identical to SEQ ID NO: 1143
  An artificially synthesized sequence

SEQ ID NO: 1160 - protein, 215 aa, Artificial Sequence; identical to SEQ ID NO: 1148
  An artificially synthesized sequence

SEQ ID NO: 1161 - protein, 447 aa, Artificial Sequence; identical to SEQ ID NO: 5
  An artificially synthesized sequence

SEQ ID NO: 1162 - protein, 213 aa, Artificial Sequence; identical to SEQ ID NO: 12
  An artificially synthesized sequence

SEQ ID NO: 1163 - protein, 448 aa, Artificial Sequence; identical to SEQ ID NO: 1143
  An artificially synthesized sequence

SEQ ID NO: 1164 - protein, 215 aa, Artificial Sequence; identical to SEQ ID NO: 1144
  An artificially synthesized sequence

SEQ ID NO: 1165 - protein, 447 aa, Artificial Sequence; identical to SEQ ID NO: 5
  An artificially synthesized sequence

SEQ ID NO: 1166 - protein, 213 aa, Artificial Sequence; identical to SEQ ID NO: 1118
  An artificially synthesized sequence

SEQ ID NO: 1167 - protein, 448 aa, Artificial Sequence; identical to SEQ ID NO: 1143
  An artificially synthesized sequence

SEQ ID NO: 1168 - protein, 215 aa, Artificial Sequence; identical to SEQ ID NO: 1148
  An artificially synthesized sequence

SEQ ID NO: 1169 - protein, 447 aa, Artificial Sequence; identical to SEQ ID NO: 8
  An artificially synthesized sequence

SEQ ID NO: 1170 - protein, 213 aa, Artificial Sequence; identical to SEQ ID NO: 12
  An artificially synthesized sequence

SEQ ID NO: 1171 - protein, 448 aa, Artificial Sequence; identical to SEQ ID NO: 1151
  An artificially synthesized sequence

SEQ ID NO: 1172 - protein, 215 aa, Artificial Sequence; identical to SEQ ID NO: 1144
  An artificially synthesized sequence

SEQ ID NO: 1173 - protein, 447 aa, Artificial Sequence; identical to SEQ ID NO: 8
  An artificially synthesized sequence

SEQ ID NO: 1174 - protein, 213 aa, Artificial Sequence; identical to SEQ ID NO: 12
  An artificially synthesized sequence

SEQ ID NO: 1175 - protein, 448 aa, Artificial Sequence; identical to SEQ ID NO: 1143
  An artificially synthesized sequence

SEQ ID NO: 1176 - protein, 215 aa, Artificial Sequence; identical to SEQ ID NO: 1148
  An artificially synthesized sequence

SEQ ID NO: 1177 - protein, 447 aa, Artificial Sequence; identical to SEQ ID NO: 5
  An artificially synthesized sequence

SEQ ID NO: 1178 - protein, 213 aa, Artificial Sequence; identical to SEQ ID NO: 1118
  An artificially synthesized sequence

SEQ ID NO: 1179 - protein, 448 aa, Artificial Sequence; identical to SEQ ID NO: 1151
  An artificially synthesized sequence

SEQ ID NO: 1180 - protein, 215 aa, Artificial Sequence; identical to SEQ ID NO: 1144
  An artificially synthesized sequence

SEQ ID NO: 1181 - protein, 443 aa, Artificial Sequence
  An artificially synthesized sequence
QVQLVQSGAEVKKPGASVTVSCKASGYTFTDYEMHWIRQPPGEGLEWIGAIDGPTPDTAYSEKFKGRVTLTADKSTSTAYMELSSLTSEDTAVYYCTRFYSYTYWGQGTLVTVSSASTKGPSVFPLAPSSKSTSGGTAALGCLVKDYFPEPVTVSWNSGALTSGVHTFPAVLQSSGLYSLSSVVTVPSSSLGTQTYICNVNHKPSNTKVDKKVEPKSCDKTHTCPPCPAPELRGGPKVFLFPPKPKDTLMISRTPEVTCVVVDVSHEDPEVKFNWYVDGVEVHNAKTKPREEQYASTYRVVSVLTVLHQDWLNGKEYKCKVSNKALPAPIEKTISKAKGQPREPQVYTLPPSRKEMTKNQVSLTCLVKGFYPSDIAVEWESNGQPENNYKTTPPYLDSDGSFFLYSKLTVDKSRWQQGNVFSCSVMHEALHNHYTQKSLSLSP

SEQ ID NO: 1182 - protein, 219 aa, Artificial Sequence; identical to SEQ ID NO: 10
  An artificially synthesized sequence

SEQ ID NO: 1183 - protein, 450 aa, Artificial Sequence
  An artificially synthesized sequence
QVQLVESGGGVVQPGRSLRLSCAASGFTFSNAWMHWVRQAPGKGLEWVAQIKAKSNNYATYYAESVKGRFTISRDDSKNSLYLQMNSLKTEDTAVYYCRYAHYGAYYGVDAWGQGTTVTVSSASTKGPSVFPLAPSSKSTSGGTAALGCLVKDYFPEPVTVSWNSGALTSGVHTFPAVLQSSGLYSLSSVVTVPSSSLGTQTYICNVNHKPSNTKVDKKVEPKSCDKTHTCPPCPAPELRGGPKVFLFPPKPKDTLMISRTPEVTCVVVDVSHEDPEVKFNWYVDGVEVHNAKTKPREEQYASTYRVVSVLTVLHQDWLNGKEYKCKVSNKALPAPIEKTISKAKGQPREPQVYTLPPSREEMTKNQVSLTCLVKGFYPSDIAVEWESNGQPENNYKTTPPYLDSDGSFFLYSKLTVDKSRWQQGNVFSCSVMHEALHNHYTQESLSLSP

SEQ ID NO: 1184 - protein, 219 aa, Artificial Sequence; identical to SEQ ID NO: 10
  An artificially synthesized sequence

SEQ ID NO: 1185 - protein, 443 aa, Artificial Sequence; identical to SEQ ID NO: 1181
  An artificially synthesized sequence

SEQ ID NO: 1186 - protein, 219 aa, Artificial Sequence; identical to SEQ ID NO: 11
  An artificially synthesized sequence

SEQ ID NO: 1187 - protein, 450 aa, Artificial Sequence; identical to SEQ ID NO: 1183
  An artificially synthesized sequence

SEQ ID NO: 1188 - protein, 219 aa, Artificial Sequence; identical to SEQ ID NO: 11
  An artificially synthesized sequence

SEQ ID NO: 1189 - protein, 444 aa, Artificial Sequence
  An artificially synthesized sequence
QVQLQQSGPQLVRPGASVKISCKASGYSFTSYWMHWVNQRPGQGLEWIGMIDPSYSETRLNQKFKDKATLTVDKSSSTAYMQLSSPTSEDSAVYYCALYGNYFDYWGQGTTLTVSSASTKGPSVFPLAPSSKSTSGGTAALGCLVKDYFPEPVTVSWNSGALTSGVHTFPAVLQSSGLYSLSSVVTVPSSSLGTQTYICNVNHKPSNTKVDKKVEPKSCDKTHTCPPCPAPELRGGPKVFLFPPKPKDTLMISRTPEVTCVVVDVSHEDPEVKFNWYVDGVEVHNAKTKPREEQYASTYRVVSVLTVLHQDWLNGKEYKCKVSNKALPAPIEKTISKAKGQPREPQVYTLPPSREEMTKNQVSLTCLVKGFYPSDIAVEWESNGQPENNYKTTPPYLDSDGSFFLYSKLTVDKSRWQQGNVFSCSVMHEALHNHYTQESLSLSP

SEQ ID NO: 1190 - protein, 214 aa, Artificial Sequence; identical to SEQ ID NO: 1014
  An artificially synthesized sequence

SEQ ID NO: 1191 - protein, 450 aa, Artificial Sequence
  An artificially synthesized sequence
QVQLVESGGGVVQPGRSLRLSCAASGFTFSNAWMHWVRQAPGKGLEWVAQIKAKSNNYATYYAESVKGRFTISRDDSKNSLYLQMNSLKTEDTAVYYCRYAHYGAYYGVDAWGQGTTVTVSSASTKGPSVFPLAPSSKSTSGGTAALGCLVKDYFPEPVTVSWNSGALTSGVHTFPAVLQSSGLYSLSSVVTVPSSSLGTQTYICNVNHKPSNTKVDKKVEPKSCDKTHTCPPCPAPELRGGPKVFLFPPKPKDTLMISRTPEVTCVVVDVSHEDPEVKFNWYVDGVEVHNAKTKPREEQYASTYRVVSVLTVLHQDWLNGKEYKCKVSNKALPAPIEKTISKAKGQPREPQVYTLPPSRKEMTKNQVSLTCLVKGFYPSDIAVEWESNGQPENNYKTTPPYLDSDGSFFLYSKLTVDKSRWQQGNVFSCSVMHEALHNHYTQKSLSLSP

SEQ ID NO: 1192 - protein, 219 aa, Artificial Sequence
  An artificially synthesized sequence
DIVMTQSPLSLPVTPGEPASISCRSSQSLVHSNRNTYLHWYQQKPGQAPRLLIYKVSNRFSGVPDRFSGSGSGTDFTLKISRVEAEDVGVYYCGQGTQVPYTFGQGTKLEIKRTVAAPSVFIFPPSDEQLKSGTASVVCLLNNFYPREAKVQWKVDNALQSGNSQESVTEQDSKDSTYSLSSTLTLSKADYEKHKVYACEVTHQGLSSPVTKSFNRGEC

SEQ ID NO: 1193 - protein, 443 aa, Artificial Sequence
  An artificially synthesized sequence
QVQLVQSGAEVKKPGASVTVSCKASGYTFTDYEMHWIRQPPGEGLEWIGAIDGPTPDTAYSEKFKGRVTLTADKSTSTAYMELSSLTSEDTAVYYCTRFYSYTYWGQGTLVTVSSASTKGPSVFPLAPSSKSTSGGTAALGCLVKDYFPEPVTVSWNSGALTSGVHTFPAVLQSSGLYSLSSVVTVPSSSLGTQTYICNVNHKPSNTKVDKKVEPKSCDKTHTCPPCPAPELRGGPKVFLFPPKPKDTLMISRTPEVTCVVVDVSHEDPEVKFNWYVDGVEVHNAKTKPREEQYASTYRVVSVLTVLHQDWLNGKEYKCKVSNKALPAPIEKTISKAKGQPREPQVYTLPPSREEMTKNQVSLTCLVKGFYPSDIAVEWESNGQPENNYKTTPPYLDSDGSFFLYSKLTVDKSRWQQGNVFSCSVMHEALHNHYTQESLSLSP

SEQ ID NO: 1194 - protein, 219 aa, Artificial Sequence; identical to SEQ ID NO: 10
  An artificially synthesized sequence

SEQ ID NO: 1195 - protein, 450 aa, Artificial Sequence; identical to SEQ ID NO: 1191
  An artificially synthesized sequence

SEQ ID NO: 1196 - protein, 219 aa, Artificial Sequence; identical to SEQ ID NO: 1192
  An artificially synthesized sequence

SEQ ID NO: 1197 - protein, 448 aa, Artificial Sequence
  An artificially synthesized sequence
QVQLVQSGAEVKKPGASVKVSCKASGYTFTSYYIHWVRQAPGQGLEWIGCIYPGNVNTNYNEKFKDRATLTVDTSISTAYMELSRLRSDDTAVYFCTRSHYGLDWNFDVWGQGTTVTVSSASTKGPSVFPLAPSSKSTSGGTAALGCLVKDYFPEPVTVSWNSGALTSGVHTFPAVLQSSGLYSLSSVVTVPSSSLGTQTYICNVNHKPSNTKVDKKVEPKSCDKTHTCPPCPAPELRGGPKVFLFPPKPKDTLMISRTPEVTCVVVDVSHEDPEVKFNWYVDGVEVHNAKTKPREEQYASTYRVVSVLTVLHQDWLNGKEYKCKVSNKALPAPIEKTISKAKGQPREPQVYTLPPSRKEMTKNQVSLTCLVKGFYPSDIAVEWESNGQPENNYKTTPPYLDSDGSFFLYSKLTVDKSRWQQGNVFSCSVMHEALHNHYTQKSLSLSP

SEQ ID NO: 1198 - protein, 214 aa, Artificial Sequence; identical to SEQ ID NO: 13
  An artificially synthesized sequence

SEQ ID NO: 1199 - protein, 446 aa, Artificial Sequence
  An artificially synthesized sequence
QSLEESGGDLVKPGASLTLTCTASGFSFSSSYWIYWVRQAPGKGLEWIACIYAGSTSSTYYASWAKGRFTISKTSSTTVTLQMTSLTAADTATYFCAKGGPDDAFHSWGPGTLVTVSSASTKGPSVFPLAPSSKSTSGGTAALGCLVKDYFPEPVTVSWNSGALTSGVHTFPAVLQSSGLYSLSSVVTVPSSSLGTQTYICNVNHKPSNTKVDKKVEPKSCDKTHTCPPCPAPELRGGPKVFLFPPKPKDTLMISRTPEVTCVVVDVSHEDPEVKFNWYVDGVEVHNAKTKPREEQYASTYRVVSVLTVLHQDWLNGKEYKCKVSNKALPAPIEKTISKAKGQPREPQVYTLPPSREEMTKNQVSLTCLVKGFYPSDIAVEWESNGQPENNYKTTPPYLDSDGSFFLYSKLTVDKSRWQQGNVFSCSVMHEALHNHYTQESLSLSP

SEQ ID NO: 1200 - protein, 216 aa, Artificial Sequence
  An artificially synthesized sequence
DVVMTQTPASVSEPVGGTVTIKCQASQSIGNYLAWYQQKPGQPPKLLIYYASNLASGVSSRFKGSRSGTEFTLTISDLECADAATYYCQCAYYESSYVTFGGGTEVVVKRTVAAPSVFIFPPSDEQLKSGTASVVCLLNNFYPREAKVQWKVDNALQSGNSQESVTEQDSKDSTYSLSSTLTLSKADYEKHKVYACEVTHQGLSSPVTKSFNRGEC

SEQ ID NO: 1201 - protein, 448 aa, Artificial Sequence
  An artificially synthesized sequence
QVQLVQSGAEVKKPGASVKVSCKASGYTFTSYYIHWVRQAPGQGLEWIGCIYPGNVNTNYNEKFKDRATLTVDTSISTAYMELSRLRSDDTAVYFCTRSHYGLDWNFDVWGQGTTVTVSSASTKGPSVFPLAPSSKSTSGGTAALGCLVKDYFPEPVTVSWNSGALTSGVHTFPAVLQSSGLYSLSSVVTVPSCSLGTQTYICNVNHKPSNTKVDKKVEPKSCDKTHTCPPCPAPELRGGPKVFLFPPKPKDTLMISRTPEVTCVVVDVSHEDPEVKFNWYVDGVEVHNAKTKPREEQYASTYRVVSVLTVLHQDWLNGKEYKCKVSNKALPAPIEKTISKAKGQPREPQVYTLPPSRKEMTKNQVSLTCLVKGFYPSDIAVEWESNGQPENNYKTTPPYLDSDGSFFLYSKLTVDKSRWQQGNVFSCSVMHEALHNHYTQKSLSLSP

SEQ ID NO: 1202 - protein, 214 aa, Artificial Sequence; identical to SEQ ID NO: 13
  An artificially synthesized sequence

SEQ ID NO: 1203 - protein, 446 aa, Artificial Sequence
  An artificially synthesized sequence
QSLEESGGDLVKPGASLTLTCTASGFSFSSSYWIYWVRQAPGKGLEWIACIYAGSTSSTYYASWAKGRFTISKTSSTTVTLQMTSLTAADTATYFCAKGGPDDAFHSWGPGTLVTVSSASTKGPSVFPLAPSSKSTSGGTAALGCLVKDYFPEPVTVSWNSGALTSGVHTFPAVLQSSGLYSLSSVVTVPSCSLGTQTYICNVNHKPSNTKVDKKVEPKSCDKTHTCPPCPAPELRGGPKVFLFPPKPKDTLMISRTPEVTCVVVDVSHEDPEVKFNWYVDGVEVHNAKTKPREEQYASTYRVVSVLTVLHQDWLNGKEYKCKVSNKALPAPIEKTISKAKGQPREPQVYTLPPSREEMTKNQVSLTCLVKGFYPSDIAVEWESNGQPENNYKTTPPYLDSDGSFFLYSKLTVDKSRWQQGNVFSCSVMHEALHNHYTQESLSLSP

SEQ ID NO: 1204 - protein, 216 aa, Artificial Sequence; identical to SEQ ID NO: 1200
  An artificially synthesized sequence

SEQ ID NO: 1205 - protein, 444 aa, Artificial Sequence
  An artificially synthesized sequence
QVQLQQSGPQLVRPGASVKISCKASGYSFTSYWMHWVNQRPGQGLEWIGMIDPSYSETRLNQKFKDKATLTVDKSSSTAYMQLSSPTSEDSAVYYCALYGNYFDYWGQGTTLTVSSASTKGPSVFPLAPSSKSTSGGTAALGCLVKDYFPEPVTVSWNSGALTSGVHTFPAVLQSSGLYSLSSVVTVPSSSLGTQTYICNVNHKPSNTKVDKKVEPKSCDKTHTCPPCPAPDLLGGDSVFLFPPKPKDTLMISRTPEVTCVVIDVAEEDGEVKFNWYVDGVEVHNAKTKPREEQYNSTYRVVSVLTVLHQDWLNGKEYKCKVSNKALPAPIEKTISKAKGQPREPQVYTLPPSRDELTKNQVSLTCLVKGFYPSDIAVEWESNGQPENNYKTTPPVLDSDGSFFLYSKLTVDKSRWQQGNVFSCSVMHEALHNHYTQKSLSLSP

SEQ ID NO: 1206 - protein, 214 aa, Artificial Sequence; identical to SEQ ID NO: 1014
  An artificially synthesized sequence

SEQ ID NO: 1207 - protein, 448 aa, Artificial Sequence
  An artificially synthesized sequence
QVQLLESGPELLKPGASVKMSCKASGYTFTDYNMHWVKQSHGKSLEWIGYIYPYTGGTGYNQKFKNKATLTVDSSSSTAYMELRSLTSEDSAVYYCARNFRYTYWYFDVWGQGTTVTVSSASTKGPSVFPLAPSSKSTSGGTAALGCLVKDYFPEPVTVSWNSGALTSGVHTFPAVLQSSGLYSLSSVVTVPSSSLGTQTYICNVNHKPSNTKVDKKVEPKSCDKTHTCPPCPAPDLLGGDSVFLFPPKPKDTLMISRTPEVTCVVIDVAEEDGEVKFNWYVDGVEVHNAKTKPREEQYNSTYRVVSVLTVLHQDWLNGKEYKCKVSNKALPAPIEKTISKAKGQPREPQVYTLPPSRKEMTKNQVSLTCLVKGFYPSDIAVEWESNGQPENNYKTTPPYLDSDGSFFLYSKLTVDKSRWQQGNVFSCSVMHEALHNHYTQKSLSLSP

SEQ ID NO: 1208 - protein, 220 aa, Artificial Sequence
  An artificially synthesized sequence
DIVMTQSPASLAVSLGQRATISCRASESVDSYDNSLMHWYQQKPGQPPKVLIYLASNLESGVPARFSGSGSRTDFTLTIDPVEADDAATYYCQQNNEDPYTFGGGTKLEIKRRRTVAAPSVFIFPPSDEQLKSGTASVVCLLNNFYPREAKVQWKVDNALQSGNSQESVTEQDSKDSTYSLSSTLTLSKADYEKHKVYACEVTHQGLSSPVTKSFNRGEC

SEQ ID NO: 1209 - protein, 448 aa, Artificial Sequence
  An artificially synthesized sequence
QVQLVQSGAEVKKPGASVKVSCKASGYTFTSYYIHWVRQAPGQGLEWIGCIYPGNVNTNYNEKFKDRATLTVDTSISTAYMELSRLRSDDTAVYFCTRSHYGLDWNFDVWGQGTTVTVSSASTKGPSVFPLAPSSKSTSGGTAALGCLVKDYFPEPVTVSWNSGALTSGVHTFPAVLQSSGLYSLSSVVTVPSSSLGTQTYICNVNHKPSNTKVDKKVEPKSCDKTHTCPPCPAPDLLGGDSVFLFPPKPKDTLMISRTPEVTCVVIDVAEEDGEVKFNWYVDGVEVHNAKTKPREEQYNSTYRVVSVLTVLHQDWLNGKEYKCKVSNKALPAPIEKTISKAKGQPREPQVYTLPPSREEMTKNQVSLTCLVKGFYPSDIAVEWESNGQPENNYKTTPPYLDSDGSFFLYSKLTVDKSRWQQGNVFSCSVMHEALHNHYTQESLSLSP

SEQ ID NO: 1210 - protein, 214 aa, Artificial Sequence; identical to SEQ ID NO: 13
  An artificially synthesized sequence

SEQ ID NO: 1211 - protein, 448 aa, Artificial Sequence
  An artificially synthesized sequence
QVQLLESGPELLKPGASVKMSCKASGYTFTDYNMHWVKQSHGKSLEWIGYIYPYTGGTGYNQKFKNKATLTVDSSSSTAYMELRSLTSEDSAVYYCARNFRYTYWYFDVWGQGTTVTVSSASTKGPSVFPLAPSSKSTSGGTAALGCLVKDYFPEPVTVSWNSGALTSGVHTFPAVLQSSGLYSLSSVVTVPSCSLGTQTYICNVNHKPSNTKVDKKVEPKSCDKTHTCPPCPAPDLLGGDSVFLFPPKPKDTLMISRTPEVTCVVIDVAEEDGEVKFNWYVDGVEVHNAKTKPREEQYNSTYRVVSVLTVLHQDWLNGKEYKCKVSNKALPAPIEKTISKAKGQPREPQVYTLPPSRKEMTKNQVSLTCLVKGFYPSDIAVEWESNGQPENNYKTTPPYLDSDGSFFLYSKLTVDKSRWQQGNVFSCSVMHEALHNHYTQKSLSLSP

SEQ ID NO: 1212 - protein, 220 aa, Artificial Sequence; identical to SEQ ID NO: 1208
  An artificially synthesized sequence

SEQ ID NO: 1213 - protein, 448 aa, Artificial Sequence
  An artificially synthesized sequence
QVQLVQSGAEVKKPGASVKVSCKASGYTFTSYYIHWVRQAPGQGLEWIGCIYPGNVNTNYNEKFKDRATLTVDTSISTAYMELSRLRSDDTAVYFCTRSHYGLDWNFDVWGQGTTVTVSSASTKGPSVFPLAPSSKSTSGGTAALGCLVKDYFPEPVTVSWNSGALTSGVHTFPAVLQSSGLYSLSSVVTVPSCSLGTQTYICNVNHKPSNTKVDKKVEPKSCDKTHTCPPCPAPDLLGGDSVFLFPPKPKDTLMISRTPEVTCVVIDVAEEDGEVKFNWYVDGVEVHNAKTKPREEQYNSTYRVVSVLTVLHQDWLNGKEYKCKVSNKALPAPIEKTISKAKGQPREPQVYTLPPSREEMTKNQVSLTCLVKGFYPSDIAVEWESNGQPENNYKTTPPYLDSDGSFFLYSKLTVDKSRWQQGNVFSCSVMHEALHNHYTQESLSLSP

SEQ ID NO: 1214 - protein, 214 aa, Artificial Sequence; identical to SEQ ID NO: 13
  An artificially synthesized sequence

SEQ ID NO: 1215-1218 - skipped (4 entries)

SEQ ID NO: 1219 - protein, 448 aa, Artificial Sequence; identical to SEQ ID NO: 1207
  An artificially synthesized sequence

SEQ ID NO: 1220 - protein, 220 aa, Artificial Sequence
  An artificially synthesized sequence
DIVMTQSPASLAVSLGQRATISCRASESVDSYDNSLMHWYQQKPGQPPKVLIYLASNLESGVPARFSGSGSRTDFTLTIDPVEADDAATYYCQQNNEDPYTFGGGTKLEIKRRRTVAAPSVFIFPPSDEQLCSGTASVVCLLNNFYPREAKVQWKVDNALQSGNSQESVTEQDSKDSTYSLSSTLTLSKADYEKHKVYACEVTHQGLSSPVTKSFNRGEC

SEQ ID NO: 1221 - protein, 448 aa, Artificial Sequence; identical to SEQ ID NO: 1209
  An artificially synthesized sequence

SEQ ID NO: 1222 - protein, 214 aa, Artificial Sequence; identical to SEQ ID NO: 14
  An artificially synthesized sequence

SEQ ID NO: 1223 - protein, 448 aa, Artificial Sequence; identical to SEQ ID NO: 1211
  An artificially synthesized sequence

SEQ ID NO: 1224 - protein, 220 aa, Artificial Sequence; identical to SEQ ID NO: 1208
  An artificially synthesized sequence

SEQ ID NO: 1225 - protein, 448 aa, Artificial Sequence; identical to SEQ ID NO: 1209
  An artificially synthesized sequence

SEQ ID NO: 1226 - protein, 214 aa, Artificial Sequence; identical to SEQ ID NO: 14
  An artificially synthesized sequence

SEQ ID NO: 1227 - protein, 448 aa, Artificial Sequence; identical to SEQ ID NO: 1207
  An artificially synthesized sequence

SEQ ID NO: 1228 - protein, 220 aa, Artificial Sequence; identical to SEQ ID NO: 1220
  An artificially synthesized sequence

SEQ ID NO: 1229 - protein, 448 aa, Artificial Sequence; identical to SEQ ID NO: 1213
  An artificially synthesized sequence

SEQ ID NO: 1230 - protein, 214 aa, Artificial Sequence; identical to SEQ ID NO: 13
  An artificially synthesized sequence

SEQ ID NO: 1231 - protein, 447 aa, Artificial Sequence
  An artificially synthesized sequence
QVQLQESGPGLVRPSQTLSLTCTVSGYSITSDHAWSWVRQPPGRGLEWIGYISYSGITTYNPSLKSRVTMLRDTSKNQFSLRLSSVTAADTAVYYCARSLARTTAMDYWGQGSLVTVSSASTKGPSVFPLAPSSKSTSGGTAALGCLVKDYFPEPVTVSWNSGALTSGVHTFPAVLQSSGLYSLSSVVTVPSSSLGTQTYICNVNHKPSNTKVDKKVEPKSCDKTHTCPPCPAPELLGGPSVFLFPPKPKDTLMISRTPEVTCVVVDVSHEDPEVKFNWYVDGVEVHNAKTKPREEQYNSTYRVVSVLTVLHQDWLNGKEYKCKVSNKALPAPIEKTISKAKGQPREPQVYTLPPSREEMTKNQVSLTCLVKGFYPSDIAVEWESNGQPENNYKTTPPVLDSDGSFFLYSKLTVDKSRWQQGNVFSCSVMHEALHNHYTQKSLSLSP

SEQ ID NO: 1232 - protein, 214 aa, Artificial Sequence
  An artificially synthesized sequence
DIQMTQSPSSLSASVGDRVTITCRASQDISSYLNWYQQKPGKAPKLLIYYTSRLHSGVPSRFSGSGSGTDFTFTISSLQPEDIATYYCQQGNTLPYTFGQGTKVEIKRTVAAPSVFIFPPSDEQLCSGTASVVCLLNNFYPREAKVQWKVDNALQSGNSQESVTEQDSKDSTYSLSSTLTLSKADYEKHKVYACEVTHQGLSSPVTKSFNRGEC

SEQ ID NO: 1233 - protein, 443 aa, Artificial Sequence; identical to SEQ ID NO: 312
  An artificially synthesized sequence

SEQ ID NO: 1234 - protein, 214 aa, Artificial Sequence; identical to SEQ ID NO: 1232
  An artificially synthesized sequence

SEQ ID NO: 1235 - protein, 444 aa, Artificial Sequence
  An artificially synthesized sequence
QVQLQESGPGLVRPSQTLSLTCTVSGYSITSDHAWSWVRQPPGRGLEWIGYISYSGITTYNPSLKSRVTMLRDTSKNQFSLRLSSVTAADTAVYYCARSLARTTAMDYWGQGSLVTVSSASTKGPSVFPLAPCSRSTSESTAALGCLVKDYFPEPVTVSWNSGALTSGVHTFPAVLQSSGLYSLSSVVTVPSSSLGTKTYTCNVDHKPSNTKVDKRVESKYGPPCPPCPAPEFLGGPSVFLFPPKPKDTLMISRTPEVTCVVVDVSQEDPEVQFNWYVDGVEVHNAKTKPREEQFNSTYRVVSVLTVLHQDWLNGKEYKCKVSNKGLPSSIEKTISKAKGQPREPQVYTLPPSQEEMTKNQVSLTCLVKGFYPSDIAVEWESNGQPENNYKTTPPVLDSDGSFFLYSRLTVDKSRWQEGNVFSCSVMHEALHNHYTQKSLSLSP

SEQ ID NO: 1236 - protein, 214 aa, Artificial Sequence; identical to SEQ ID NO: 1232
  An artificially synthesized sequence

SEQ ID NO: 1237 - protein, 447 aa, Artificial Sequence
  An artificially synthesized sequence
QVQLQESGPGLVRPSQTLSLTCTVSGYSITSDHAWSWVRQPPGRGLEWIGYISYSGITTYNPSLKSRVTMLRDTSKNQFSLRLSSVTAADTAVYYCARSLARTTAMDYWGQGSLVTVSSASTKGPSVFPLAPSSKSTSGGTAALGCLVKDYFPEPVTVSWNSGALTSGVHTFPAVLQSSGLYSLSSVVTVPSCSLGTQTYICNVNHKPSNTKVDKRVEPKSCDKTHTCPPCPAPELRRGPSVFLFPPKPKDTLMISRTPEVTCVVVDVSHEDPEVKFNWYVDGVEVHNAKTKPREEQYNSTYRVVSVLTVLHQDWLNGKEYKCKVSNKGLPSSIEKTISKAKGQPREPQVYTLPPSREEMTKNQVSLTCLVKGFYPSDIAVEWESNGQPENNYKTTPPVLDSDGSFFLYSKLTVDKSRWQEGNVFSCSVMHEALHNHYTQKSLSLSP

SEQ ID NO: 1238 - protein, 214 aa, Artificial Sequence [sequence omitted]

SEQ ID NO: 1239 - protein, 447 aa, Artificial Sequence
  An artificially synthesized sequence
QVQLQESGPGLVRPSQTLSLTCTVSGYSITSDHAWSWVRQPPGRGLEWIGYISYSGITTYNPSLKSRVTMLRDTSKNQFSLRLSSVTAADTAVYYCARSLARTTAMDYWGQGSLVTVSSASTKGPSVFPLAPSSKSTSGGTAALGCLVKDYFPEPVTVSWNSGCLTSGVHTFPAVLQSSGLYSLSSVVTVPSSSLGTQTYICNVNHKPSNTKVDKRVEPKSCDKTHTCPPCPAPELRRGPSVFLFPPKPKDTLMISRTPEVTCVVVDVSHEDPEVKFNWYVDGVEVHNAKTKPREEQYNSTYRVVSVLTVLHQDWLNGKEYKCKVSNKGLPSSIEKTISKAKGQPREPQVYTLPPSREEMTKNQVSLTCLVKGFYPSDIAVEWESNGQPENNYKTTPPVLDSDGSFFLYSKLTVDKSRWQEGNVFSCSVMHEALHNHYTQKSLSLSP

SEQ ID NO: 1240 - protein, 214 aa, Artificial Sequence [sequence omitted]

SEQ ID NO: 1241 - protein, 580 aa, Artificial Sequence
  An artificially synthesized sequence
MAGTVRTACLVVAMLLSLDFPGQAQPPPPPPDATCHQVRSFFQRLQPGLKWVPETPVPGSDLQVCLPKGPTCCSRKMEEKYQLTARLNMEQLLQSASMELKFLIIQNAAVFQEAFEIVVRHAKNYTNAMFKNNYPSLTPQAFEFVGEFFTDVSLYILGSDINVDDMVNELFDSLFPVIYTQLMNPGLPDSALDINECLRGARRDLKVFGNFPKLIMTQVSKSLQVTRIFLQALNLGIEVINTTDHLKFSKDCGRMLTRMWYCSYCQGLMMVKPCGGYCNVVMQGCMAGVVEIDKYWREYILSLEELVNGMYRIYDMENVLLGLFSTIHDSIQYVQKNAGKLTTTIGKLCAHSQQRQYRSAYYPEDLFIDKKVLKVAHVEHEETLSSRRRELIQKLKSFISFYSALPGYICSHSPVAENDTLCWNGQELVERYSQKAARNGMKNQFNLHELKMKGPEPVVSQIIDKLKHINQLLRTMSMPKGRVLDKNLDEEGFESGDCGDDEDECIGGSGDGMIKVKNQLRFLAELAYDLDVDDAPGNSQQATPKDNEISTFHNLGNVHSPLKLLTSMAISVVCFFFLVH

SEQ ID NO: 1242 - protein, 447 aa, Artificial Sequence; identical to SEQ ID NO: 1007
  An artificially synthesized sequence

SEQ ID NO: 1243 - protein, 213 aa, Artificial Sequence; identical to SEQ ID NO: 1008
  An artificially synthesized sequence

SEQ ID NO: 1244 - protein, 328 aa, Artificial Sequence; identical to SEQ ID NO: 18
  An artificially synthesized sequence

SEQ ID NO: 1245 - protein, 328 aa, Artificial Sequence; identical to SEQ ID NO: 128
  An artificially synthesized sequence

SEQ ID NO: 1246 - protein, 119 aa, Artificial Sequence; identical to SEQ ID NO: 1010
  An artificially synthesized sequence

SEQ ID NO: 1247 - protein, 328 aa, Artificial Sequence
  An artificially synthesized sequence
ASTKGPSVFPLAPCSKSTSGGTAALGCLVKDYFPEPVTVSWNSGALTSGVHTFPAVLQSSGLYSLSSVVTVPSCSLCTQTYICNVNHKPSNTKVDKRVEPKSCDKTHTCPPCPAPELRRGPSVFLFPPKPKDTLMISRTPEVTCVVVDVSHEDPEVKFNWYVDGVEVHNAKTKPREEQYNSTYRVVSVLTVLHQDWLNGKEYKCKVSNKGLPSSIEKTISKAKGQPREPQVYTLPPSREEMTKNQVSLTCLVKGFYPSDIAVEWESNGQPENNYKTTPPVLDSDGSFFLYSKLTVDKSRWQEGNVFSCSVMHEALHNHYTQKSLSLSP

SEQ ID NO: 1248 - protein, 328 aa, Artificial Sequence
  An artificially synthesized sequence
ASTKGPSVFPLAPSCKSTSGGTAALGCLVKDYFPEPVTVSWNSGALTSGVHTFPAVLQSSGLYSLSSVVTVPSCSLCTQTYICNVNHKPSNTKVDKRVEPKSCDKTHTCPPCPAPELRRGPSVFLFPPKPKDTLMISRTPEVTCVVVDVSHEDPEVKFNWYVDGVEVHNAKTKPREEQYNSTYRVVSVLTVLHQDWLNGKEYKCKVSNKGLPSSIEKTISKAKGQPREPQVYTLPPSREEMTKNQVSLTCLVKGFYPSDIAVEWESNGQPENNYKTTPPVLDSDGSFFLYSKLTVDKSRWQEGNVFSCSVMHEALHNHYTQKSLSLSP

SEQ ID NO: 1249 - protein, 328 aa, Artificial Sequence
  An artificially synthesized sequence
ASTKGPSVFPLAPSSCSTSGGTAALGCLVKDYFPEPVTVSWNSGALTSGVHTFPAVLQSSGLYSLSSVVTVPSCSLCTQTYICNVNHKPSNTKVDKRVEPKSCDKTHTCPPCPAPELRRGPSVFLFPPKPKDTLMISRTPEVTCVVVDVSHEDPEVKFNWYVDGVEVHNAKTKPREEQYNSTYRVVSVLTVLHQDWLNGKEYKCKVSNKGLPSSIEKTISKAKGQPREPQVYTLPPSREEMTKNQVSLTCLVKGFYPSDIAVEWESNGQPENNYKTTPPVLDSDGSFFLYSKLTVDKSRWQEGNVFSCSVMHEALHNHYTQKSLSLSP

SEQ ID NO: 1250 - protein, 328 aa, Artificial Sequence
  An artificially synthesized sequence
ASTKGPSVFPLAPSSKCTSGGTAALGCLVKDYFPEPVTVSWNSGALTSGVHTFPAVLQSSGLYSLSSVVTVPSCSLCTQTYICNVNHKPSNTKVDKRVEPKSCDKTHTCPPCPAPELRRGPSVFLFPPKPKDTLMISRTPEVTCVVVDVSHEDPEVKFNWYVDGVEVHNAKTKPREEQYNSTYRVVSVLTVLHQDWLNGKEYKCKVSNKGLPSSIEKTISKAKGQPREPQVYTLPPSREEMTKNQVSLTCLVKGFYPSDIAVEWESNGQPENNYKTTPPVLDSDGSFFLYSKLTVDKSRWQEGNVFSCSVMHEALHNHYTQKSLSLSP

SEQ ID NO: 1251 - protein, 328 aa, Artificial Sequence
  An artificially synthesized sequence
ASTKGPSVFPLAPSSKSCSGGTAALGCLVKDYFPEPVTVSWNSGALTSGVHTFPAVLQSSGLYSLSSVVTVPSCSLCTQTYICNVNHKPSNTKVDKRVEPKSCDKTHTCPPCPAPELRRGPSVFLFPPKPKDTLMISRTPEVTCVVVDVSHEDPEVKFNWYVDGVEVHNAKTKPREEQYNSTYRVVSVLTVLHQDWLNGKEYKCKVSNKGLPSSIEKTISKAKGQPREPQVYTLPPSREEMTKNQVSLTCLVKGFYPSDIAVEWESNGQPENNYKTTPPVLDSDGSFFLYSKLTVDKSRWQEGNVFSCSVMHEALHNHYTQKSLSLSP

SEQ ID NO: 1252 - protein, 328 aa, Artificial Sequence
  An artificially synthesized sequence
ASTKGPSVFPLAPSSKSTCGGTAALGCLVKDYFPEPVTVSWNSGALTSGVHTFPAVLQSSGLYSLSSVVTVPSCSLCTQTYICNVNHKPSNTKVDKRVEPKSCDKTHTCPPCPAPELRRGPSVFLFPPKPKDTLMISRTPEVTCVVVDVSHEDPEVKFNWYVDGVEVHNAKTKPREEQYNSTYRVVSVLTVLHQDWLNGKEYKCKVSNKGLPSSIEKTISKAKGQPREPQVYTLPPSREEMTKNQVSLTCLVKGFYPSDIAVEWESNGQPENNYKTTPPVLDSDGSFFLYSKLTVDKSRWQEGNVFSCSVMHEALHNHYTQKSLSLSP

SEQ ID NO: 1253 - protein, 328 aa, Artificial Sequence
  An artificially synthesized sequence
ASTKGPSVFPLAPSSKSTSCGTAALGCLVKDYFPEPVTVSWNSGALTSGVHTFPAVLQSSGLYSLSSVVTVPSCSLCTQTYICNVNHKPSNTKVDKRVEPKSCDKTHTCPPCPAPELRRGPSVFLFPPKPKDTLMISRTPEVTCVVVDVSHEDPEVKFNWYVDGVEVHNAKTKPREEQYNSTYRVVSVLTVLHQDWLNGKEYKCKVSNKGLPSSIEKTISKAKGQPREPQVYTLPPSREEMTKNQVSLTCLVKGFYPSDIAVEWESNGQPENNYKTTPPVLDSDGSFFLYSKLTVDKSRWQEGNVFSCSVMHEALHNHYTQKSLSLSP

SEQ ID NO: 1254 - protein, 328 aa, Artificial Sequence
  An artificially synthesized sequence
ASTKGPSVFPLAPSSKSTSGCTAALGCLVKDYFPEPVTVSWNSGALTSGVHTFPAVLQSSGLYSLSSVVTVPSCSLCTQTYICNVNHKPSNTKVDKRVEPKSCDKTHTCPPCPAPELRRGPSVFLFPPKPKDTLMISRTPEVTCVVVDVSHEDPEVKFNWYVDGVEVHNAKTKPREEQYNSTYRVVSVLTVLHQDWLNGKEYKCKVSNKGLPSSIEKTISKAKGQPREPQVYTLPPSREEMTKNQVSLTCLVKGFYPSDIAVEWESNGQPENNYKTTPPVLDSDGSFFLYSKLTVDKSRWQEGNVFSCSVMHEALHNHYTQKSLSLSP

SEQ ID NO: 1255 - protein, 328 aa, Artificial Sequence
  An artificially synthesized sequence
ASTKGPSVFPLAPCSKSTSGGTAALGCLVKDYFPEPVTVSWNSGALTSGVHTFPAVLQSSGLYSLSSVVTVPSCSLGCQTYICNVNHKPSNTKVDKRVEPKSCDKTHTCPPCPAPELRRGPSVFLFPPKPKDTLMISRTPEVTCVVVDVSHEDPEVKFNWYVDGVEVHNAKTKPREEQYNSTYRVVSVLTVLHQDWLNGKEYKCKVSNKGLPSSIEKTISKAKGQPREPQVYTLPPSREEMTKNQVSLTCLVKGFYPSDIAVEWESNGQPENNYKTTPPVLDSDGSFFLYSKLTVDKSRWQEGNVFSCSVMHEALHNHYTQKSLSLSP

SEQ ID NO: 1256 - protein, 328 aa, Artificial Sequence
  An artificially synthesized sequence
ASTKGPSVFPLAPSCKSTSGGTAALGCLVKDYFPEPVTVSWNSGALTSGVHTFPAVLQSSGLYSLSSVVTVPSCSLGCQTYICNVNHKPSNTKVDKRVEPKSCDKTHTCPPCPAPELRRGPSVFLFPPKPKDTLMISRTPEVTCVVVDVSHEDPEVKFNWYVDGVEVHNAKTKPREEQYNSTYRVVSVLTVLHQDWLNGKEYKCKVSNKGLPSSIEKTISKAKGQPREPQVYTLPPSREEMTKNQVSLTCLVKGFYPSDIAVEWESNGQPENNYKTTPPVLDSDGSFFLYSKLTVDKSRWQEGNVFSCSVMHEALHNHYTQKSLSLSP

SEQ ID NO: 1257 - protein, 328 aa, Artificial Sequence
  An artificially synthesized sequence
ASTKGPSVFPLAPSSCSTSGGTAALGCLVKDYFPEPVTVSWNSGALTSGVHTFPAVLQSSGLYSLSSVVTVPSCSLGCQTYICNVNHKPSNTKVDKRVEPKSCDKTHTCPPCPAPELRRGPSVFLFPPKPKDTLMISRTPEVTCVVVDVSHEDPEVKFNWYVDGVEVHNAKTKPREEQYNSTYRVVSVLTVLHQDWLNGKEYKCKVSNKGLPSSIEKTISKAKGQPREPQVYTLPPSREEMTKNQVSLTCLVKGFYPSDIAVEWESNGQPENNYKTTPPVLDSDGSFFLYSKLTVDKSRWQEGNVFSCSVMHEALHNHYTQKSLSLSP

SEQ ID NO: 1258 - protein, 328 aa, Artificial Sequence
  An artificially synthesized sequence
ASTKGPSVFPLAPSSKCTSGGTAALGCLVKDYFPEPVTVSWNSGALTSGVHTFPAVLQSSGLYSLSSVVTVPSCSLGCQTYICNVNHKPSNTKVDKRVEPKSCDKTHTCPPCPAPELRRGPSVFLFPPKPKDTLMISRTPEVTCVVVDVSHEDPEVKFNWYVDGVEVHNAKTKPREEQYNSTYRVVSVLTVLHQDWLNGKEYKCKVSNKGLPSSIEKTISKAKGQPREPQVYTLPPSREEMTKNQVSLTCLVKGFYPSDIAVEWESNGQPENNYKTTPPVLDSDGSFFLYSKLTVDKSRWQEGNVFSCSVMHEALHNHYTQKSLSLSP

SEQ ID NO: 1259 - protein, 328 aa, Artificial Sequence
  An artificially synthesized sequence
ASTKGPSVFPLAPSSKSCSGGTAALGCLVKDYFPEPVTVSWNSGALTSGVHTFPAVLQSSGLYSLSSVVTVPSCSLGCQTYICNVNHKPSNTKVDKRVEPKSCDKTHTCPPCPAPELRRGPSVFLFPPKPKDTLMISRTPEVTCVVVDVSHEDPEVKFNWYVDGVEVHNAKTKPREEQYNSTYRVVSVLTVLHQDWLNGKEYKCKVSNKGLPSSIEKTISKAKGQPREPQVYTLPPSREEMTKNQVSLTCLVKGFYPSDIAVEWESNGQPENNYKTTPPVLDSDGSFFLYSKLTVDKSRWQEGNVFSCSVMHEALHNHYTQKSLSLSP

SEQ ID NO: 1260 - protein, 328 aa, Artificial Sequence
  An artificially synthesized sequence
ASTKGPSVFPLAPSSKSTCGGTAALGCLVKDYFPEPVTVSWNSGALTSGVHTFPAVLQSSGLYSLSSVVTVPSCSLGCQTYICNVNHKPSNTKVDKRVEPKSCDKTHTCPPCPAPELRRGPSVFLFPPKPKDTLMISRTPEVTCVVVDVSHEDPEVKFNWYVDGVEVHNAKTKPREEQYNSTYRVVSVLTVLHQDWLNGKEYKCKVSNKGLPSSIEKTISKAKGQPREPQVYTLPPSREEMTKNQVSLTCLVKGFYPSDIAVEWESNGQPENNYKTTPPVLDSDGSFFLYSKLTVDKSRWQEGNVFSCSVMHEALHNHYTQKSLSLSP

SEQ ID NO: 1261 - protein, 328 aa, Artificial Sequence
  An artificially synthesized sequence
ASTKGPSVFPLAPSSKSTSCGTAALGCLVKDYFPEPVTVSWNSGALTSGVHTFPAVLQSSGLYSLSSVVTVPSCSLGCQTYICNVNHKPSNTKVDKRVEPKSCDKTHTCPPCPAPELRRGPSVFLFPPKPKDTLMISRTPEVTCVVVDVSHEDPEVKFNWYVDGVEVHNAKTKPREEQYNSTYRVVSVLTVLHQDWLNGKEYKCKVSNKGLPSSIEKTISKAKGQPREPQVYTLPPSREEMTKNQVSLTCLVKGFYPSDIAVEWESNGQPENNYKTTPPVLDSDGSFFLYSKLTVDKSRWQEGNVFSCSVMHEALHNHYTQKSLSLSP

SEQ ID NO: 1262 - protein, 328 aa, Artificial Sequence
  An artificially synthesized sequence
ASTKGPSVFPLAPSSKSTSGCTAALGCLVKDYFPEPVTVSWNSGALTSGVHTFPAVLQSSGLYSLSSVVTVPSCSLGCQTYICNVNHKPSNTKVDKRVEPKSCDKTHTCPPCPAPELRRGPSVFLFPPKPKDTLMISRTPEVTCVVVDVSHEDPEVKFNWYVDGVEVHNAKTKPREEQYNSTYRVVSVLTVLHQDWLNGKEYKCKVSNKGLPSSIEKTISKAKGQPREPQVYTLPPSREEMTKNQVSLTCLVKGFYPSDIAVEWESNGQPENNYKTTPPVLDSDGSFFLYSKLTVDKSRWQEGNVFSCSVMHEALHNHYTQKSLSLSP

SEQ ID NO: 1263 - protein, 328 aa, Artificial Sequence; identical to SEQ ID NO: 1015
  An artificially synthesized sequence

SEQ ID NO: 1264 - protein, 328 aa, Artificial Sequence; identical to SEQ ID NO: 1016
  An artificially synthesized sequence

SEQ ID NO: 1265 - protein, 328 aa, Artificial Sequence; identical to SEQ ID NO: 1022
  An artificially synthesized sequence

SEQ ID NO: 1266 - protein, 328 aa, Artificial Sequence; identical to SEQ ID NO: 1026
  An artificially synthesized sequence

SEQ ID NO: 1267 - protein, 328 aa, Artificial Sequence
  An artificially synthesized sequence
ASTKGPSVFPLAPCSKSTSGGTAALGCLVKDYFPEPVTVSWNSGALTSGVHTFPAVLQSSGLYSLSSVVTVPSCSLGTQTYICNVNHKPSNTKVDKRVEPKSCDKTHTCPPCPAPELRRGPSVFLFPPKPKDTLMISRTPEVTCVVVDVSHEDPEVKFNWYVDGVEVHNAKTKPREEQYNSTYRVVSVLTVLHQDWLNGKEYKCKVSNKGLPSSIEKTISKAKGQPREPQVCTLPPSREEMTKNQVSLWCLVKGFYPSDIAVEWESNGQPENNYKTTPPVLDSDGSFFLYSKLTVDKSRWQEGNVFSCSVMHEALHNHYTQKSLSLSP

SEQ ID NO: 1268 - protein, 328 aa, Artificial Sequence
  An artificially synthesized sequence
ASTKGPSVFPLAPSCKSTSGGTAALGCLVKDYFPEPVTVSWNSGALTSGVHTFPAVLQSSGLYSLSSVVTVPSCSLGTQTYICNVNHKPSNTKVDKRVEPKSCDKTHTCPPCPAPELRRGPSVFLFPPKPKDTLMISRTPEVTCVVVDVSHEDPEVKFNWYVDGVEVHNAKTKPREEQYNSTYRVVSVLTVLHQDWLNGKEYKCKVSNKGLPSSIEKTISKAKGQPREPQVCTLPPSREEMTKNQVSLWCLVKGFYPSDIAVEWESNGQPENNYKTTPPVLDSDGSFFLYSKLTVDKSRWQEGNVFSCSVMHEALHNHYTQKSLSLSP

SEQ ID NO: 1269 - protein, 328 aa, Artificial Sequence
  An artificially synthesized sequence
ASTKGPSVFPLAPSSCSTSGGTAALGCLVKDYFPEPVTVSWNSGALTSGVHTFPAVLQSSGLYSLSSVVTVPSCSLGTQTYICNVNHKPSNTKVDKRVEPKSCDKTHTCPPCPAPELRRGPSVFLFPPKPKDTLMISRTPEVTCVVVDVSHEDPEVKFNWYVDGVEVHNAKTKPREEQYNSTYRVVSVLTVLHQDWLNGKEYKCKVSNKGLPSSIEKTISKAKGQPREPQVCTLPPSREEMTKNQVSLWCLVKGFYPSDIAVEWESNGQPENNYKTTPPVLDSDGSFFLYSKLTVDKSRWQEGNVFSCSVMHEALHNHYTQKSLSLSP

SEQ ID NO: 1270 - protein, 328 aa, Artificial Sequence
  An artificially synthesized sequence
ASTKGPSVFPLAPSSKCTSGGTAALGCLVKDYFPEPVTVSWNSGALTSGVHTFPAVLQSSGLYSLSSVVTVPSCSLGTQTYICNVNHKPSNTKVDKRVEPKSCDKTHTCPPCPAPELRRGPSVFLFPPKPKDTLMISRTPEVTCVVVDVSHEDPEVKFNWYVDGVEVHNAKTKPREEQYNSTYRVVSVLTVLHQDWLNGKEYKCKVSNKGLPSSIEKTISKAKGQPREPQVCTLPPSREEMTKNQVSLWCLVKGFYPSDIAVEWESNGQPENNYKTTPPVLDSDGSFFLYSKLTVDKSRWQEGNVFSCSVMHEALHNHYTQKSLSLSP

SEQ ID NO: 1271 - protein, 328 aa, Artificial Sequence
  An artificially synthesized sequence
ASTKGPSVFPLAPSSKSCSGGTAALGCLVKDYFPEPVTVSWNSGALTSGVHTFPAVLQSSGLYSLSSVVTVPSCSLGTQTYICNVNHKPSNTKVDKRVEPKSCDKTHTCPPCPAPELRRGPSVFLFPPKPKDTLMISRTPEVTCVVVDVSHEDPEVKFNWYVDGVEVHNAKTKPREEQYNSTYRVVSVLTVLHQDWLNGKEYKCKVSNKGLPSSIEKTISKAKGQPREPQVCTLPPSREEMTKNQVSLWCLVKGFYPSDIAVEWESNGQPENNYKTTPPVLDSDGSFFLYSKLTVDKSRWQEGNVFSCSVMHEALHNHYTQKSLSLSP

SEQ ID NO: 1272 - protein, 328 aa, Artificial Sequence
  An artificially synthesized sequence
ASTKGPSVFPLAPSSKSTCGGTAALGCLVKDYFPEPVTVSWNSGALTSGVHTFPAVLQSSGLYSLSSVVTVPSCSLGTQTYICNVNHKPSNTKVDKRVEPKSCDKTHTCPPCPAPELRRGPSVFLFPPKPKDTLMISRTPEVTCVVVDVSHEDPEVKFNWYVDGVEVHNAKTKPREEQYNSTYRVVSVLTVLHQDWLNGKEYKCKVSNKGLPSSIEKTISKAKGQPREPQVCTLPPSREEMTKNQVSLWCLVKGFYPSDIAVEWESNGQPENNYKTTPPVLDSDGSFFLYSKLTVDKSRWQEGNVFSCSVMHEALHNHYTQKSLSLSP

SEQ ID NO: 1273 - protein, 328 aa, Artificial Sequence
  An artificially synthesized sequence
ASTKGPSVFPLAPSSKSTSCGTAALGCLVKDYFPEPVTVSWNSGALTSGVHTFPAVLQSSGLYSLSSVVTVPSCSLGTQTYICNVNHKPSNTKVDKRVEPKSCDKTHTCPPCPAPELRRGPSVFLFPPKPKDTLMISRTPEVTCVVVDVSHEDPEVKFNWYVDGVEVHNAKTKPREEQYNSTYRVVSVLTVLHQDWLNGKEYKCKVSNKGLPSSIEKTISKAKGQPREPQVCTLPPSREEMTKNQVSLWCLVKGFYPSDIAVEWESNGQPENNYKTTPPVLDSDGSFFLYSKLTVDKSRWQEGNVFSCSVMHEALHNHYTQKSLSLSP

SEQ ID NO: 1274 - protein, 328 aa, Artificial Sequence
  An artificially synthesized sequence
ASTKGPSVFPLAPSSKSTSGCTAALGCLVKDYFPEPVTVSWNSGALTSGVHTFPAVLQSSGLYSLSSVVTVPSCSLGTQTYICNVNHKPSNTKVDKRVEPKSCDKTHTCPPCPAPELRRGPSVFLFPPKPKDTLMISRTPEVTCVVVDVSHEDPEVKFNWYVDGVEVHNAKTKPREEQYNSTYRVVSVLTVLHQDWLNGKEYKCKVSNKGLPSSIEKTISKAKGQPREPQVCTLPPSREEMTKNQVSLWCLVKGFYPSDIAVEWESNGQPENNYKTTPPVLDSDGSFFLYSKLTVDKSRWQEGNVFSCSVMHEALHNHYTQKSLSLSP

SEQ ID NO: 1275 - protein, 328 aa, Artificial Sequence; identical to SEQ ID NO: 1267
  An artificially synthesized sequence

SEQ ID NO: 1276 - protein, 328 aa, Artificial Sequence; identical to SEQ ID NO: 1268
  An artificially synthesized sequence

SEQ ID NO: 1277 - protein, 328 aa, Artificial Sequence; identical to SEQ ID NO: 1269
  An artificially synthesized sequence

SEQ ID NO: 1278 - protein, 328 aa, Artificial Sequence; identical to SEQ ID NO: 1270
  An artificially synthesized sequence

SEQ ID NO: 1279 - protein, 328 aa, Artificial Sequence; identical to SEQ ID NO: 1271
  An artificially synthesized sequence

SEQ ID NO: 1280 - protein, 328 aa, Artificial Sequence; identical to SEQ ID NO: 1272
  An artificially synthesized sequence

SEQ ID NO: 1281 - protein, 328 aa, Artificial Sequence; identical to SEQ ID NO: 1273
  An artificially synthesized sequence

SEQ ID NO: 1282 - protein, 328 aa, Artificial Sequence; identical to SEQ ID NO: 1274
  An artificially synthesized sequence

SEQ ID NO: 1283 - protein, 328 aa, Artificial Sequence
  An artificially synthesized sequence
ASTKGPSVFPLAPSSKSTSGGTAALGCLVKDYFPEPVTVSWNSGALTSGVHTFPAVLQSSGLYSLSSVVTVPSCSLCTQTYICNVNHKPSNTKVDKRVEPKSCDKTHTCPPCPAPELRRGPSVFLFPPKPKDTLMISRTPEVTCVVVDVSHEDPEVKFNWYVDGVEVHNAKTKPREEQYNSTYRVVSVLTVLHQDWLNGKEYKCKVSNKGLPSSIEKTISKAKGQPREPQVYTLPPSRCEMTKNQVSLSCAVKGFYPSDIAVEWESNGQPENNYKTTPPVLDSDGSFFLVSKLTVDKSRWQEGNVFSCSVMHEALHNHYTQKSLSLSP

SEQ ID NO: 1284 - protein, 328 aa, Artificial Sequence
  An artificially synthesized sequence
ASTKGPSVFPLAPSSKSTSGGTAALGCLVKDYFPEPVTVSWNSGALTSGVHTFPAVLQSSGLYSLSSVVTVPSCSLGCQTYICNVNHKPSNTKVDKRVEPKSCDKTHTCPPCPAPELRRGPSVFLFPPKPKDTLMISRTPEVTCVVVDVSHEDPEVKFNWYVDGVEVHNAKTKPREEQYNSTYRVVSVLTVLHQDWLNGKEYKCKVSNKGLPSSIEKTISKAKGQPREPQVYTLPPSRCEMTKNQVSLSCAVKGFYPSDIAVEWESNGQPENNYKTTPPVLDSDGSFFLVSKLTVDKSRWQEGNVFSCSVMHEALHNHYTQKSLSLSP

SEQ ID NO: 1285 - protein, 328 aa, Artificial Sequence
  An artificially synthesized sequence
ASTKGPSVFPLAPSSKSTKKKTAALGCLVKDYFPEPVTVSWNSGALTSGVHTFPAVLQSSGLYSLSSVVTVPSCSDDDQTYICNVNHKPSNTKVDKRVEPKSCDKTHTCPPCPAPELRRGPSVFLFPPKPKDTLMISRTPEVTCVVVDVSHEDPEVKFNWYVDGVEVHNAKTKPREEQYNSTYRVVSVLTVLHQDWLNGKEYKCKVSNKGLPSSIEKTISKAKGQPREPQVYTLPPSREEMTKNQVSLTCLVKGFYPSDIAVEWESNGQPENNYKTTPPVLDSDGSFFLYSKLTVDKSRWQEGNVFSCSVMHEALHNHYTQKSLSLSP

SEQ ID NO: 1286 - protein, 328 aa, Artificial Sequence
  An artificially synthesized sequence
ASTKGPSVFPLAPSSKSTKKKTAALGCLVKDYFPEPVTVSWNSGALTSGVHTFPAVLQSSGLYSLSSVVTVPSCSEEEQTYICNVNHKPSNTKVDKRVEPKSCDKTHTCPPCPAPELRRGPSVFLFPPKPKDTLMISRTPEVTCVVVDVSHEDPEVKFNWYVDGVEVHNAKTKPREEQYNSTYRVVSVLTVLHQDWLNGKEYKCKVSNKGLPSSIEKTISKAKGQPREPQVYTLPPSREEMTKNQVSLTCLVKGFYPSDIAVEWESNGQPENNYKTTPPVLDSDGSFFLYSKLTVDKSRWQEGNVFSCSVMHEALHNHYTQKSLSLSP

SEQ ID NO: 1287 - protein, 328 aa, Artificial Sequence
  An artificially synthesized sequence
ASTKGPSVFPLAPSSKSTRRRTAALGCLVKDYFPEPVTVSWNSGALTSGVHTFPAVLQSSGLYSLSSVVTVPSCSDDDQTYICNVNHKPSNTKVDKRVEPKSCDKTHTCPPCPAPELRRGPSVFLFPPKPKDTLMISRTPEVTCVVVDVSHEDPEVKFNWYVDGVEVHNAKTKPREEQYNSTYRVVSVLTVLHQDWLNGKEYKCKVSNKGLPSSIEKTISKAKGQPREPQVYTLPPSREEMTKNQVSLTCLVKGFYPSDIAVEWESNGQPENNYKTTPPVLDSDGSFFLYSKLTVDKSRWQEGNVFSCSVMHEALHNHYTQKSLSLSP

SEQ ID NO: 1288 - protein, 328 aa, Artificial Sequence
  An artificially synthesized sequence
ASTKGPSVFPLAPSSKSTRRRTAALGCLVKDYFPEPVTVSWNSGALTSGVHTFPAVLQSSGLYSLSSVVTVPSCSEEEQTYICNVNHKPSNTKVDKRVEPKSCDKTHTCPPCPAPELRRGPSVFLFPPKPKDTLMISRTPEVTCVVVDVSHEDPEVKFNWYVDGVEVHNAKTKPREEQYNSTYRVVSVLTVLHQDWLNGKEYKCKVSNKGLPSSIEKTISKAKGQPREPQVYTLPPSREEMTKNQVSLTCLVKGFYPSDIAVEWESNGQPENNYKTTPPVLDSDGSFFLYSKLTVDKSRWQEGNVFSCSVMHEALHNHYTQKSLSLSP

SEQ ID NO: 1289 - protein, 328 aa, Artificial Sequence
  An artificially synthesized sequence
ASTKGPSVFPLAPSSKSTSKKTAALGCLVKDYFPEPVTVSWNSGALTSGVHTFPAVLQSSGLYSLSSVVTVPSCSDDDQTYICNVNHKPSNTKVDKRVEPKSCDKTHTCPPCPAPELRRGPSVFLFPPKPKDTLMISRTPEVTCVVVDVSHEDPEVKFNWYVDGVEVHNAKTKPREEQYNSTYRVVSVLTVLHQDWLNGKEYKCKVSNKGLPSSIEKTISKAKGQPREPQVYTLPPSREEMTKNQVSLTCLVKGFYPSDIAVEWESNGQPENNYKTTPPVLDSDGSFFLYSKLTVDKSRWQEGNVFSCSVMHEALHNHYTQKSLSLSP

SEQ ID NO: 1290 - protein, 328 aa, Artificial Sequence
  An artificially synthesized sequence
ASTKGPSVFPLAPSSKSTKGKTAALGCLVKDYFPEPVTVSWNSGALTSGVHTFPAVLQSSGLYSLSSVVTVPSCSDDDQTYICNVNHKPSNTKVDKRVEPKSCDKTHTCPPCPAPELRRGPSVFLFPPKPKDTLMISRTPEVTCVVVDVSHEDPEVKFNWYVDGVEVHNAKTKPREEQYNSTYRVVSVLTVLHQDWLNGKEYKCKVSNKGLPSSIEKTISKAKGQPREPQVYTLPPSREEMTKNQVSLTCLVKGFYPSDIAVEWESNGQPENNYKTTPPVLDSDGSFFLYSKLTVDKSRWQEGNVFSCSVMHEALHNHYTQKSLSLSP

SEQ ID NO: 1291 - protein, 328 aa, Artificial Sequence
  An artificially synthesized sequence
ASTKGPSVFPLAPSSKSTKKGTAALGCLVKDYFPEPVTVSWNSGALTSGVHTFPAVLQSSGLYSLSSVVTVPSCSDDDQTYICNVNHKPSNTKVDKRVEPKSCDKTHTCPPCPAPELRRGPSVFLFPPKPKDTLMISRTPEVTCVVVDVSHEDPEVKFNWYVDGVEVHNAKTKPREEQYNSTYRVVSVLTVLHQDWLNGKEYKCKVSNKGLPSSIEKTISKAKGQPREPQVYTLPPSREEMTKNQVSLTCLVKGFYPSDIAVEWESNGQPENNYKTTPPVLDSDGSFFLYSKLTVDKSRWQEGNVFSCSVMHEALHNHYTQKSLSLSP

SEQ ID NO: 1292 - protein, 328 aa, Artificial Sequence
  An artificially synthesized sequence
ASTKGPSVFPLAPSSKSTKKKTAALGCLVKDYFPEPVTVSWNSGALTSGVHTFPAVLQSSGLYSLSSVVTVPSCSLDDQTYICNVNHKPSNTKVDKRVEPKSCDKTHTCPPCPAPELRRGPSVFLFPPKPKDTLMISRTPEVTCVVVDVSHEDPEVKFNWYVDGVEVHNAKTKPREEQYNSTYRVVSVLTVLHQDWLNGKEYKCKVSNKGLPSSIEKTISKAKGQPREPQVYTLPPSREEMTKNQVSLTCLVKGFYPSDIAVEWESNGQPENNYKTTPPVLDSDGSFFLYSKLTVDKSRWQEGNVFSCSVMHEALHNHYTQKSLSLSP

SEQ ID NO: 1293 - protein, 328 aa, Artificial Sequence
  An artificially synthesized sequence
ASTKGPSVFPLAPSSKSTKKKTAALGCLVKDYFPEPVTVSWNSGALTSGVHTFPAVLQSSGLYSLSSVVTVPSCSDGDQTYICNVNHKPSNTKVDKRVEPKSCDKTHTCPPCPAPELRRGPSVFLFPPKPKDTLMISRTPEVTCVVVDVSHEDPEVKFNWYVDGVEVHNAKTKPREEQYNSTYRVVSVLTVLHQDWLNGKEYKCKVSNKGLPSSIEKTISKAKGQPREPQVYTLPPSREEMTKNQVSLTCLVKGFYPSDIAVEWESNGQPENNYKTTPPVLDSDGSFFLYSKLTVDKSRWQEGNVFSCSVMHEALHNHYTQKSLSLSP

SEQ ID NO: 1294 - protein, 328 aa, Artificial Sequence
  An artificially synthesized sequence
ASTKGPSVFPLAPSSKSTKKKTAALGCLVKDYFPEPVTVSWNSGALTSGVHTFPAVLQSSGLYSLSSVVTVPSCSDDTQTYICNVNHKPSNTKVDKRVEPKSCDKTHTCPPCPAPELRRGPSVFLFPPKPKDTLMISRTPEVTCVVVDVSHEDPEVKFNWYVDGVEVHNAKTKPREEQYNSTYRVVSVLTVLHQDWLNGKEYKCKVSNKGLPSSIEKTISKAKGQPREPQVYTLPPSREEMTKNQVSLTCLVKGFYPSDIAVEWESNGQPENNYKTTPPVLDSDGSFFLYSKLTVDKSRWQEGNVFSCSVMHEALHNHYTQKSLSLSP

SEQ ID NO: 1295 - protein, 328 aa, Artificial Sequence
  An artificially synthesized sequence
ASTKGPSVFPLAPSSKSTSKKTAALGCLVKDYFPEPVTVSWNSGALTSGVHTFPAVLQSSGLYSLSSVVTVPSCSEEEQTYICNVNHKPSNTKVDKRVEPKSCDKTHTCPPCPAPELRRGPSVFLFPPKPKDTLMISRTPEVTCVVVDVSHEDPEVKFNWYVDGVEVHNAKTKPREEQYNSTYRVVSVLTVLHQDWLNGKEYKCKVSNKGLPSSIEKTISKAKGQPREPQVYTLPPSREEMTKNQVSLTCLVKGFYPSDIAVEWESNGQPENNYKTTPPVLDSDGSFFLYSKLTVDKSRWQEGNVFSCSVMHEALHNHYTQKSLSLSP

SEQ ID NO: 1296 - protein, 328 aa, Artificial Sequence
  An artificially synthesized sequence
ASTKGPSVFPLAPSSKSTKGKTAALGCLVKDYFPEPVTVSWNSGALTSGVHTFPAVLQSSGLYSLSSVVTVPSCSEEEQTYICNVNHKPSNTKVDKRVEPKSCDKTHTCPPCPAPELRRGPSVFLFPPKPKDTLMISRTPEVTCVVVDVSHEDPEVKFNWYVDGVEVHNAKTKPREEQYNSTYRVVSVLTVLHQDWLNGKEYKCKVSNKGLPSSIEKTISKAKGQPREPQVYTLPPSREEMTKNQVSLTCLVKGFYPSDIAVEWESNGQPENNYKTTPPVLDSDGSFFLYSKLTVDKSRWQEGNVFSCSVMHEALHNHYTQKSLSLSP

SEQ ID NO: 1297 - protein, 328 aa, Artificial Sequence
  An artificially synthesized sequence
ASTKGPSVFPLAPSSKSTKKGTAALGCLVKDYFPEPVTVSWNSGALTSGVHTFPAVLQSSGLYSLSSVVTVPSCSEEEQTYICNVNHKPSNTKVDKRVEPKSCDKTHTCPPCPAPELRRGPSVFLFPPKPKDTLMISRTPEVTCVVVDVSHEDPEVKFNWYVDGVEVHNAKTKPREEQYNSTYRVVSVLTVLHQDWLNGKEYKCKVSNKGLPSSIEKTISKAKGQPREPQVYTLPPSREEMTKNQVSLTCLVKGFYPSDIAVEWESNGQPENNYKTTPPVLDSDGSFFLYSKLTVDKSRWQEGNVFSCSVMHEALHNHYTQKSLSLSP

SEQ ID NO: 1298 - protein, 328 aa, Artificial Sequence
  An artificially synthesized sequence
ASTKGPSVFPLAPSSKSTKKKTAALGCLVKDYFPEPVTVSWNSGALTSGVHTFPAVLQSSGLYSLSSVVTVPSCSLEEQTYICNVNHKPSNTKVDKRVEPKSCDKTHTCPPCPAPELRRGPSVFLFPPKPKDTLMISRTPEVTCVVVDVSHEDPEVKFNWYVDGVEVHNAKTKPREEQYNSTYRVVSVLTVLHQDWLNGKEYKCKVSNKGLPSSIEKTISKAKGQPREPQVYTLPPSREEMTKNQVSLTCLVKGFYPSDIAVEWESNGQPENNYKTTPPVLDSDGSFFLYSKLTVDKSRWQEGNVFSCSVMHEALHNHYTQKSLSLSP

SEQ ID NO: 1299 - protein, 328 aa, Artificial Sequence
  An artificially synthesized sequence
ASTKGPSVFPLAPSSKSTKKKTAALGCLVKDYFPEPVTVSWNSGALTSGVHTFPAVLQSSGLYSLSSVVTVPSCSEGEQTYICNVNHKPSNTKVDKRVEPKSCDKTHTCPPCPAPELRRGPSVFLFPPKPKDTLMISRTPEVTCVVVDVSHEDPEVKFNWYVDGVEVHNAKTKPREEQYNSTYRVVSVLTVLHQDWLNGKEYKCKVSNKGLPSSIEKTISKAKGQPREPQVYTLPPSREEMTKNQVSLTCLVKGFYPSDIAVEWESNGQPENNYKTTPPVLDSDGSFFLYSKLTVDKSRWQEGNVFSCSVMHEALHNHYTQKSLSLSP

SEQ ID NO: 1300 - protein, 328 aa, Artificial Sequence
  An artificially synthesized sequence
ASTKGPSVFPLAPSSKSTKKKTAALGCLVKDYFPEPVTVSWNSGALTSGVHTFPAVLQSSGLYSLSSVVTVPSCSEETQTYICNVNHKPSNTKVDKRVEPKSCDKTHTCPPCPAPELRRGPSVFLFPPKPKDTLMISRTPEVTCVVVDVSHEDPEVKFNWYVDGVEVHNAKTKPREEQYNSTYRVVSVLTVLHQDWLNGKEYKCKVSNKGLPSSIEKTISKAKGQPREPQVYTLPPSREEMTKNQVSLTCLVKGFYPSDIAVEWESNGQPENNYKTTPPVLDSDGSFFLYSKLTVDKSRWQEGNVFSCSVMHEALHNHYTQKSLSLSP

SEQ ID NO: 1301 - protein, 328 aa, Artificial Sequence
  An artificially synthesized sequence
ASTKGPSVFPLAPSSKSTSRRTAALGCLVKDYFPEPVTVSWNSGALTSGVHTFPAVLQSSGLYSLSSVVTVPSCSDDDQTYICNVNHKPSNTKVDKRVEPKSCDKTHTCPPCPAPELRRGPSVFLFPPKPKDTLMISRTPEVTCVVVDVSHEDPEVKFNWYVDGVEVHNAKTKPREEQYNSTYRVVSVLTVLHQDWLNGKEYKCKVSNKGLPSSIEKTISKAKGQPREPQVYTLPPSREEMTKNQVSLTCLVKGFYPSDIAVEWESNGQPENNYKTTPPVLDSDGSFFLYSKLTVDKSRWQEGNVFSCSVMHEALHNHYTQKSLSLSP

SEQ ID NO: 1302 - protein, 328 aa, Artificial Sequence
  An artificially synthesized sequence
ASTKGPSVFPLAPSSKSTRGRTAALGCLVKDYFPEPVTVSWNSGALTSGVHTFPAVLQSSGLYSLSSVVTVPSCSDDDQTYICNVNHKPSNTKVDKRVEPKSCDKTHTCPPCPAPELRRGPSVFLFPPKPKDTLMISRTPEVTCVVVDVSHEDPEVKFNWYVDGVEVHNAKTKPREEQYNSTYRVVSVLTVLHQDWLNGKEYKCKVSNKGLPSSIEKTISKAKGQPREPQVYTLPPSREEMTKNQVSLTCLVKGFYPSDIAVEWESNGQPENNYKTTPPVLDSDGSFFLYSKLTVDKSRWQEGNVFSCSVMHEALHNHYTQKSLSLSP

SEQ ID NO: 1303 - protein, 328 aa, Artificial Sequence
  An artificially synthesized sequence
ASTKGPSVFPLAPSSKSTRRGTAALGCLVKDYFPEPVTVSWNSGALTSGVHTFPAVLQSSGLYSLSSVVTVPSCSDDDQTYICNVNHKPSNTKVDKRVEPKSCDKTHTCPPCPAPELRRGPSVFLFPPKPKDTLMISRTPEVTCVVVDVSHEDPEVKFNWYVDGVEVHNAKTKPREEQYNSTYRVVSVLTVLHQDWLNGKEYKCKVSNKGLPSSIEKTISKAKGQPREPQVYTLPPSREEMTKNQVSLTCLVKGFYPSDIAVEWESNGQPENNYKTTPPVLDSDGSFFLYSKLTVDKSRWQEGNVFSCSVMHEALHNHYTQKSLSLSP

SEQ ID NO: 1304 - protein, 328 aa, Artificial Sequence
  An artificially synthesized sequence
ASTKGPSVFPLAPSSKSTRRRTAALGCLVKDYFPEPVTVSWNSGALTSGVHTFPAVLQSSGLYSLSSVVTVPSCSLDDQTYICNVNHKPSNTKVDKRVEPKSCDKTHTCPPCPAPELRRGPSVFLFPPKPKDTLMISRTPEVTCVVVDVSHEDPEVKFNWYVDGVEVHNAKTKPREEQYNSTYRVVSVLTVLHQDWLNGKEYKCKVSNKGLPSSIEKTISKAKGQPREPQVYTLPPSREEMTKNQVSLTCLVKGFYPSDIAVEWESNGQPENNYKTTPPVLDSDGSFFLYSKLTVDKSRWQEGNVFSCSVMHEALHNHYTQKSLSLSP

SEQ ID NO: 1305 - protein, 328 aa, Artificial Sequence
  An artificially synthesized sequence
ASTKGPSVFPLAPSSKSTRRRTAALGCLVKDYFPEPVTVSWNSGALTSGVHTFPAVLQSSGLYSLSSVVTVPSCSDGDQTYICNVNHKPSNTKVDKRVEPKSCDKTHTCPPCPAPELRRGPSVFLFPPKPKDTLMISRTPEVTCVVVDVSHEDPEVKFNWYVDGVEVHNAKTKPREEQYNSTYRVVSVLTVLHQDWLNGKEYKCKVSNKGLPSSIEKTISKAKGQPREPQVYTLPPSREEMTKNQVSLTCLVKGFYPSDIAVEWESNGQPENNYKTTPPVLDSDGSFFLYSKLTVDKSRWQEGNVFSCSVMHEALHNHYTQKSLSLSP

SEQ ID NO: 1306 - protein, 328 aa, Artificial Sequence
  An artificially synthesized sequence
ASTKGPSVFPLAPSSKSTRRRTAALGCLVKDYFPEPVTVSWNSGALTSGVHTFPAVLQSSGLYSLSSVVTVPSCSDDTQTYICNVNHKPSNTKVDKRVEPKSCDKTHTCPPCPAPELRRGPSVFLFPPKPKDTLMISRTPEVTCVVVDVSHEDPEVKFNWYVDGVEVHNAKTKPREEQYNSTYRVVSVLTVLHQDWLNGKEYKCKVSNKGLPSSIEKTISKAKGQPREPQVYTLPPSREEMTKNQVSLTCLVKGFYPSDIAVEWESNGQPENNYKTTPPVLDSDGSFFLYSKLTVDKSRWQEGNVFSCSVMHEALHNHYTQKSLSLSP

SEQ ID NO: 1307 - protein, 328 aa, Artificial Sequence
  An artificially synthesized sequence
ASTKGPSVFPLAPSSKSTKGGTAALGCLVKDYFPEPVTVSWNSGALTSGVHTFPAVLQSSGLYSLSSVVTVPSCSDDDQTYICNVNHKPSNTKVDKRVEPKSCDKTHTCPPCPAPELRRGPSVFLFPPKPKDTLMISRTPEVTCVVVDVSHEDPEVKFNWYVDGVEVHNAKTKPREEQYNSTYRVVSVLTVLHQDWLNGKEYKCKVSNKGLPSSIEKTISKAKGQPREPQVYTLPPSREEMTKNQVSLTCLVKGFYPSDIAVEWESNGQPENNYKTTPPVLDSDGSFFLYSKLTVDKSRWQEGNVFSCSVMHEALHNHYTQKSLSLSP

SEQ ID NO: 1308 - protein, 328 aa, Artificial Sequence
  An artificially synthesized sequence
ASTKGPSVFPLAPSSKSTSKGTAALGCLVKDYFPEPVTVSWNSGALTSGVHTFPAVLQSSGLYSLSSVVTVPSCSDDDQTYICNVNHKPSNTKVDKRVEPKSCDKTHTCPPCPAPELRRGPSVFLFPPKPKDTLMISRTPEVTCVVVDVSHEDPEVKFNWYVDGVEVHNAKTKPREEQYNSTYRVVSVLTVLHQDWLNGKEYKCKVSNKGLPSSIEKTISKAKGQPREPQVYTLPPSREEMTKNQVSLTCLVKGFYPSDIAVEWESNGQPENNYKTTPPVLDSDGSFFLYSKLTVDKSRWQEGNVFSCSVMHEALHNHYTQKSLSLSP

SEQ ID NO: 1309 - protein, 328 aa, Artificial Sequence
  An artificially synthesized sequence
ASTKGPSVFPLAPSSKSTSGKTAALGCLVKDYFPEPVTVSWNSGALTSGVHTFPAVLQSSGLYSLSSVVTVPSCSDDDQTYICNVNHKPSNTKVDKRVEPKSCDKTHTCPPCPAPELRRGPSVFLFPPKPKDTLMISRTPEVTCVVVDVSHEDPEVKFNWYVDGVEVHNAKTKPREEQYNSTYRVVSVLTVLHQDWLNGKEYKCKVSNKGLPSSIEKTISKAKGQPREPQVYTLPPSREEMTKNQVSLTCLVKGFYPSDIAVEWESNGQPENNYKTTPPVLDSDGSFFLYSKLTVDKSRWQEGNVFSCSVMHEALHNHYTQKSLSLSP

SEQ ID NO: 1310 - protein, 328 aa, Artificial Sequence
  An artificially synthesized sequence
ASTKGPSVFPLAPSSKSTKGGTAALGCLVKDYFPEPVTVSWNSGALTSGVHTFPAVLQSSGLYSLSSVVTVPSCSEEEQTYICNVNHKPSNTKVDKRVEPKSCDKTHTCPPCPAPELRRGPSVFLFPPKPKDTLMISRTPEVTCVVVDVSHEDPEVKFNWYVDGVEVHNAKTKPREEQYNSTYRVVSVLTVLHQDWLNGKEYKCKVSNKGLPSSIEKTISKAKGQPREPQVYTLPPSREEMTKNQVSLTCLVKGFYPSDIAVEWESNGQPENNYKTTPPVLDSDGSFFLYSKLTVDKSRWQEGNVFSCSVMHEALHNHYTQKSLSLSP

SEQ ID NO: 1311 - protein, 328 aa, Artificial Sequence
  An artificially synthesized sequence
ASTKGPSVFPLAPSSKSTSKGTAALGCLVKDYFPEPVTVSWNSGALTSGVHTFPAVLQSSGLYSLSSVVTVPSCSEEEQTYICNVNHKPSNTKVDKRVEPKSCDKTHTCPPCPAPELRRGPSVFLFPPKPKDTLMISRTPEVTCVVVDVSHEDPEVKFNWYVDGVEVHNAKTKPREEQYNSTYRVVSVLTVLHQDWLNGKEYKCKVSNKGLPSSIEKTISKAKGQPREPQVYTLPPSREEMTKNQVSLTCLVKGFYPSDIAVEWESNGQPENNYKTTPPVLDSDGSFFLYSKLTVDKSRWQEGNVFSCSVMHEALHNHYTQKSLSLSP

SEQ ID NO: 1312 - protein, 328 aa, Artificial Sequence
  An artificially synthesized sequence
ASTKGPSVFPLAPSSKSTSGKTAALGCLVKDYFPEPVTVSWNSGALTSGVHTFPAVLQSSGLYSLSSVVTVPSCSEEEQTYICNVNHKPSNTKVDKRVEPKSCDKTHTCPPCPAPELRRGPSVFLFPPKPKDTLMISRTPEVTCVVVDVSHEDPEVKFNWYVDGVEVHNAKTKPREEQYNSTYRVVSVLTVLHQDWLNGKEYKCKVSNKGLPSSIEKTISKAKGQPREPQVYTLPPSREEMTKNQVSLTCLVKGFYPSDIAVEWESNGQPENNYKTTPPVLDSDGSFFLYSKLTVDKSRWQEGNVFSCSVMHEALHNHYTQKSLSLSP

SEQ ID NO: 1313 - protein, 328 aa, Artificial Sequence
  An artificially synthesized sequence
ASTKGPSVFPLAPSSKSTRGGTAALGCLVKDYFPEPVTVSWNSGALTSGVHTFPAVLQSSGLYSLSSVVTVPSCSDDDQTYICNVNHKPSNTKVDKRVEPKSCDKTHTCPPCPAPELRRGPSVFLFPPKPKDTLMISRTPEVTCVVVDVSHEDPEVKFNWYVDGVEVHNAKTKPREEQYNSTYRVVSVLTVLHQDWLNGKEYKCKVSNKGLPSSIEKTISKAKGQPREPQVYTLPPSREEMTKNQVSLTCLVKGFYPSDIAVEWESNGQPENNYKTTPPVLDSDGSFFLYSKLTVDKSRWQEGNVFSCSVMHEALHNHYTQKSLSLSP

SEQ ID NO: 1314 - protein, 328 aa, Artificial Sequence
  An artificially synthesized sequence
ASTKGPSVFPLAPSSKSTSRGTAALGCLVKDYFPEPVTVSWNSGALTSGVHTFPAVLQSSGLYSLSSVVTVPSCSDDDQTYICNVNHKPSNTKVDKRVEPKSCDKTHTCPPCPAPELRRGPSVFLFPPKPKDTLMISRTPEVTCVVVDVSHEDPEVKFNWYVDGVEVHNAKTKPREEQYNSTYRVVSVLTVLHQDWLNGKEYKCKVSNKGLPSSIEKTISKAKGQPREPQVYTLPPSREEMTKNQVSLTCLVKGFYPSDIAVEWESNGQPENNYKTTPPVLDSDGSFFLYSKLTVDKSRWQEGNVFSCSVMHEALHNHYTQKSLSLSP

SEQ ID NO: 1315 - protein, 328 aa, Artificial Sequence
  An artificially synthesized sequence
ASTKGPSVFPLAPSSKSTSGRTAALGCLVKDYFPEPVTVSWNSGALTSGVHTFPAVLQSSGLYSLSSVVTVPSCSDDDQTYICNVNHKPSNTKVDKRVEPKSCDKTHTCPPCPAPELRRGPSVFLFPPKPKDTLMISRTPEVTCVVVDVSHEDPEVKFNWYVDGVEVHNAKTKPREEQYNSTYRVVSVLTVLHQDWLNGKEYKCKVSNKGLPSSIEKTISKAKGQPREPQVYTLPPSREEMTKNQVSLTCLVKGFYPSDIAVEWESNGQPENNYKTTPPVLDSDGSFFLYSKLTVDKSRWQEGNVFSCSVMHEALHNHYTQKSLSLSP

SEQ ID NO: 1316 - protein, 328 aa, Artificial Sequence
  An artificially synthesized sequence
ASTKGPSVFPLAPSSKSTRGGTAALGCLVKDYFPEPVTVSWNSGALTSGVHTFPAVLQSSGLYSLSSVVTVPSCSEEEQTYICNVNHKPSNTKVDKRVEPKSCDKTHTCPPCPAPELRRGPSVFLFPPKPKDTLMISRTPEVTCVVVDVSHEDPEVKFNWYVDGVEVHNAKTKPREEQYNSTYRVVSVLTVLHQDWLNGKEYKCKVSNKGLPSSIEKTISKAKGQPREPQVYTLPPSREEMTKNQVSLTCLVKGFYPSDIAVEWESNGQPENNYKTTPPVLDSDGSFFLYSKLTVDKSRWQEGNVFSCSVMHEALHNHYTQKSLSLSP

SEQ ID NO: 1317 - protein, 328 aa, Artificial Sequence
  An artificially synthesized sequence
ASTKGPSVFPLAPSSKSTSRGTAALGCLVKDYFPEPVTVSWNSGALTSGVHTFPAVLQSSGLYSLSSVVTVPSCSEEEQTYICNVNHKPSNTKVDKRVEPKSCDKTHTCPPCPAPELRRGPSVFLFPPKPKDTLMISRTPEVTCVVVDVSHEDPEVKFNWYVDGVEVHNAKTKPREEQYNSTYRVVSVLTVLHQDWLNGKEYKCKVSNKGLPSSIEKTISKAKGQPREPQVYTLPPSREEMTKNQVSLTCLVKGFYPSDIAVEWESNGQPENNYKTTPPVLDSDGSFFLYSKLTVDKSRWQEGNVFSCSVMHEALHNHYTQKSLSLSP

SEQ ID NO: 1318 - protein, 328 aa, Artificial Sequence
  An artificially synthesized sequence
ASTKGPSVFPLAPSSKSTSGRTAALGCLVKDYFPEPVTVSWNSGALTSGVHTFPAVLQSSGLYSLSSVVTVPSCSEEEQTYICNVNHKPSNTKVDKRVEPKSCDKTHTCPPCPAPELRRGPSVFLFPPKPKDTLMISRTPEVTCVVVDVSHEDPEVKFNWYVDGVEVHNAKTKPREEQYNSTYRVVSVLTVLHQDWLNGKEYKCKVSNKGLPSSIEKTISKAKGQPREPQVYTLPPSREEMTKNQVSLTCLVKGFYPSDIAVEWESNGQPENNYKTTPPVLDSDGSFFLYSKLTVDKSRWQEGNVFSCSVMHEALHNHYTQKSLSLSP

SEQ ID NO: 1319 - protein, 328 aa, Artificial Sequence
  An artificially synthesized sequence
ASTKGPSVFPLAPSSKSTSGKTAALGCLVKDYFPEPVTVSWNSGALTSGVHTFPAVLQSSGLYSLSSVVTVPSCSLGDQTYICNVNHKPSNTKVDKRVEPKSCDKTHTCPPCPAPELRRGPSVFLFPPKPKDTLMISRTPEVTCVVVDVSHEDPEVKFNWYVDGVEVHNAKTKPREEQYNSTYRVVSVLTVLHQDWLNGKEYKCKVSNKGLPSSIEKTISKAKGQPREPQVYTLPPSREEMTKNQVSLTCLVKGFYPSDIAVEWESNGQPENNYKTTPPVLDSDGSFFLYSKLTVDKSRWQEGNVFSCSVMHEALHNHYTQKSLSLSP

SEQ ID NO: 1320 - protein, 328 aa, Artificial Sequence
  An artificially synthesized sequence
ASTKGPSVFPLAPSSKSTSGKTAALGCLVKDYFPEPVTVSWNSGALTSGVHTFPAVLQSSGLYSLSSVVTVPSCSLGEQTYICNVNHKPSNTKVDKRVEPKSCDKTHTCPPCPAPELRRGPSVFLFPPKPKDTLMISRTPEVTCVVVDVSHEDPEVKFNWYVDGVEVHNAKTKPREEQYNSTYRVVSVLTVLHQDWLNGKEYKCKVSNKGLPSSIEKTISKAKGQPREPQVYTLPPSREEMTKNQVSLTCLVKGFYPSDIAVEWESNGQPENNYKTTPPVLDSDGSFFLYSKLTVDKSRWQEGNVFSCSVMHEALHNHYTQKSLSLSP

SEQ ID NO: 1321 - protein, 328 aa, Artificial Sequence
  An artificially synthesized sequence
ASTKGPSVFPLAPSSKSTSGRTAALGCLVKDYFPEPVTVSWNSGALTSGVHTFPAVLQSSGLYSLSSVVTVPSCSLGDQTYICNVNHKPSNTKVDKRVEPKSCDKTHTCPPCPAPELRRGPSVFLFPPKPKDTLMISRTPEVTCVVVDVSHEDPEVKFNWYVDGVEVHNAKTKPREEQYNSTYRVVSVLTVLHQDWLNGKEYKCKVSNKGLPSSIEKTISKAKGQPREPQVYTLPPSREEMTKNQVSLTCLVKGFYPSDIAVEWESNGQPENNYKTTPPVLDSDGSFFLYSKLTVDKSRWQEGNVFSCSVMHEALHNHYTQKSLSLSP

SEQ ID NO: 1322 - protein, 328 aa, Artificial Sequence
  An artificially synthesized sequence
ASTKGPSVFPLAPSSKSTSGRTAALGCLVKDYFPEPVTVSWNSGALTSGVHTFPAVLQSSGLYSLSSVVTVPSCSLGEQTYICNVNHKPSNTKVDKRVEPKSCDKTHTCPPCPAPELRRGPSVFLFPPKPKDTLMISRTPEVTCVVVDVSHEDPEVKFNWYVDGVEVHNAKTKPREEQYNSTYRVVSVLTVLHQDWLNGKEYKCKVSNKGLPSSIEKTISKAKGQPREPQVYTLPPSREEMTKNQVSLTCLVKGFYPSDIAVEWESNGQPENNYKTTPPVLDSDGSFFLYSKLTVDKSRWQEGNVFSCSVMHEALHNHYTQKSLSLSP

SEQ ID NO: 1323 - protein, 328 aa, Artificial Sequence
  An artificially synthesized sequence
ASTKGPSVFPLAPSSKSTSGDTAALGCLVKDYFPEPVTVSWNSGALTSGVHTFPAVLQSSGLYSLSSVVTVPSCSLGKQTYICNVNHKPSNTKVDKRVEPKSCDKTHTCPPCPAPELRRGPSVFLFPPKPKDTLMISRTPEVTCVVVDVSHEDPEVKFNWYVDGVEVHNAKTKPREEQYNSTYRVVSVLTVLHQDWLNGKEYKCKVSNKGLPSSIEKTISKAKGQPREPQVYTLPPSREEMTKNQVSLTCLVKGFYPSDIAVEWESNGQPENNYKTTPPVLDSDGSFFLYSKLTVDKSRWQEGNVFSCSVMHEALHNHYTQKSLSLSP

SEQ ID NO: 1324 - protein, 328 aa, Artificial Sequence
  An artificially synthesized sequence
ASTKGPSVFPLAPSSKSTSGDTAALGCLVKDYFPEPVTVSWNSGALTSGVHTFPAVLQSSGLYSLSSVVTVPSCSLGRQTYICNVNHKPSNTKVDKRVEPKSCDKTHTCPPCPAPELRRGPSVFLFPPKPKDTLMISRTPEVTCVVVDVSHEDPEVKFNWYVDGVEVHNAKTKPREEQYNSTYRVVSVLTVLHQDWLNGKEYKCKVSNKGLPSSIEKTISKAKGQPREPQVYTLPPSREEMTKNQVSLTCLVKGFYPSDIAVEWESNGQPENNYKTTPPVLDSDGSFFLYSKLTVDKSRWQEGNVFSCSVMHEALHNHYTQKSLSLSP

SEQ ID NO: 1325 - protein, 328 aa, Artificial Sequence
  An artificially synthesized sequence
ASTKGPSVFPLAPSSKSTSGETAALGCLVKDYFPEPVTVSWNSGALTSGVHTFPAVLQSSGLYSLSSVVTVPSCSLGKQTYICNVNHKPSNTKVDKRVEPKSCDKTHTCPPCPAPELRRGPSVFLFPPKPKDTLMISRTPEVTCVVVDVSHEDPEVKFNWYVDGVEVHNAKTKPREEQYNSTYRVVSVLTVLHQDWLNGKEYKCKVSNKGLPSSIEKTISKAKGQPREPQVYTLPPSREEMTKNQVSLTCLVKGFYPSDIAVEWESNGQPENNYKTTPPVLDSDGSFFLYSKLTVDKSRWQEGNVFSCSVMHEALHNHYTQKSLSLSP

SEQ ID NO: 1326 - protein, 328 aa, Artificial Sequence
  An artificially synthesized sequence
ASTKGPSVFPLAPSSKSTSGETAALGCLVKDYFPEPVTVSWNSGALTSGVHTFPAVLQSSGLYSLSSVVTVPSCSLGRQTYICNVNHKPSNTKVDKRVEPKSCDKTHTCPPCPAPELRRGPSVFLFPPKPKDTLMISRTPEVTCVVVDVSHEDPEVKFNWYVDGVEVHNAKTKPREEQYNSTYRVVSVLTVLHQDWLNGKEYKCKVSNKGLPSSIEKTISKAKGQPREPQVYTLPPSREEMTKNQVSLTCLVKGFYPSDIAVEWESNGQPENNYKTTPPVLDSDGSFFLYSKLTVDKSRWQEGNVFSCSVMHEALHNHYTQKSLSLSP

SEQ ID NO: 1327 - protein, 328 aa, Artificial Sequence
  An artificially synthesized sequence
ASTKGPSVFPLAPSSKSTSGKTAALGCLVKDYFPEPVTVSWNSGALTSGVHTFPAVLQSSGLYSLSSVVTVPSCSLDTQTYICNVNHKPSNTKVDKRVEPKSCDKTHTCPPCPAPELRRGPSVFLFPPKPKDTLMISRTPEVTCVVVDVSHEDPEVKFNWYVDGVEVHNAKTKPREEQYNSTYRVVSVLTVLHQDWLNGKEYKCKVSNKGLPSSIEKTISKAKGQPREPQVYTLPPSREEMTKNQVSLTCLVKGFYPSDIAVEWESNGQPENNYKTTPPVLDSDGSFFLYSKLTVDKSRWQEGNVFSCSVMHEALHNHYTQKSLSLSP

SEQ ID NO: 1328 - protein, 328 aa, Artificial Sequence
  An artificially synthesized sequence
ASTKGPSVFPLAPSSKSTSGKTAALGCLVKDYFPEPVTVSWNSGALTSGVHTFPAVLQSSGLYSLSSVVTVPSCSLETQTYICNVNHKPSNTKVDKRVEPKSCDKTHTCPPCPAPELRRGPSVFLFPPKPKDTLMISRTPEVTCVVVDVSHEDPEVKFNWYVDGVEVHNAKTKPREEQYNSTYRVVSVLTVLHQDWLNGKEYKCKVSNKGLPSSIEKTISKAKGQPREPQVYTLPPSREEMTKNQVSLTCLVKGFYPSDIAVEWESNGQPENNYKTTPPVLDSDGSFFLYSKLTVDKSRWQEGNVFSCSVMHEALHNHYTQKSLSLSP

SEQ ID NO: 1329 - protein, 328 aa, Artificial Sequence
  An artificially synthesized sequence
ASTKGPSVFPLAPSSKSTSGRTAALGCLVKDYFPEPVTVSWNSGALTSGVHTFPAVLQSSGLYSLSSVVTVPSCSLDTQTYICNVNHKPSNTKVDKRVEPKSCDKTHTCPPCPAPELRRGPSVFLFPPKPKDTLMISRTPEVTCVVVDVSHEDPEVKFNWYVDGVEVHNAKTKPREEQYNSTYRVVSVLTVLHQDWLNGKEYKCKVSNKGLPSSIEKTISKAKGQPREPQVYTLPPSREEMTKNQVSLTCLVKGFYPSDIAVEWESNGQPENNYKTTPPVLDSDGSFFLYSKLTVDKSRWQEGNVFSCSVMHEALHNHYTQKSLSLSP

SEQ ID NO: 1330 - protein, 328 aa, Artificial Sequence
  An artificially synthesized sequence
ASTKGPSVFPLAPSSKSTSGRTAALGCLVKDYFPEPVTVSWNSGALTSGVHTFPAVLQSSGLYSLSSVVTVPSCSLETQTYICNVNHKPSNTKVDKRVEPKSCDKTHTCPPCPAPELRRGPSVFLFPPKPKDTLMISRTPEVTCVVVDVSHEDPEVKFNWYVDGVEVHNAKTKPREEQYNSTYRVVSVLTVLHQDWLNGKEYKCKVSNKGLPSSIEKTISKAKGQPREPQVYTLPPSREEMTKNQVSLTCLVKGFYPSDIAVEWESNGQPENNYKTTPPVLDSDGSFFLYSKLTVDKSRWQEGNVFSCSVMHEALHNHYTQKSLSLSP

SEQ ID NO: 1331 - protein, 328 aa, Artificial Sequence
  An artificially synthesized sequence
ASTKGPSVFPLAPSSKSTSGDTAALGCLVKDYFPEPVTVSWNSGALTSGVHTFPAVLQSSGLYSLSSVVTVPSCSLKTQTYICNVNHKPSNTKVDKRVEPKSCDKTHTCPPCPAPELRRGPSVFLFPPKPKDTLMISRTPEVTCVVVDVSHEDPEVKFNWYVDGVEVHNAKTKPREEQYNSTYRVVSVLTVLHQDWLNGKEYKCKVSNKGLPSSIEKTISKAKGQPREPQVYTLPPSREEMTKNQVSLTCLVKGFYPSDIAVEWESNGQPENNYKTTPPVLDSDGSFFLYSKLTVDKSRWQEGNVFSCSVMHEALHNHYTQKSLSLSP

SEQ ID NO: 1332 - protein, 328 aa, Artificial Sequence
  An artificially synthesized sequence
ASTKGPSVFPLAPSSKSTSGDTAALGCLVKDYFPEPVTVSWNSGALTSGVHTFPAVLQSSGLYSLSSVVTVPSCSLRTQTYICNVNHKPSNTKVDKRVEPKSCDKTHTCPPCPAPELRRGPSVFLFPPKPKDTLMISRTPEVTCVVVDVSHEDPEVKFNWYVDGVEVHNAKTKPREEQYNSTYRVVSVLTVLHQDWLNGKEYKCKVSNKGLPSSIEKTISKAKGQPREPQVYTLPPSREEMTKNQVSLTCLVKGFYPSDIAVEWESNGQPENNYKTTPPVLDSDGSFFLYSKLTVDKSRWQEGNVFSCSVMHEALHNHYTQKSLSLSP

SEQ ID NO: 1333 - protein, 328 aa, Artificial Sequence
  An artificially synthesized sequence
ASTKGPSVFPLAPSSKSTSGETAALGCLVKDYFPEPVTVSWNSGALTSGVHTFPAVLQSSGLYSLSSVVTVPSCSLKTQTYICNVNHKPSNTKVDKRVEPKSCDKTHTCPPCPAPELRRGPSVFLFPPKPKDTLMISRTPEVTCVVVDVSHEDPEVKFNWYVDGVEVHNAKTKPREEQYNSTYRVVSVLTVLHQDWLNGKEYKCKVSNKGLPSSIEKTISKAKGQPREPQVYTLPPSREEMTKNQVSLTCLVKGFYPSDIAVEWESNGQPENNYKTTPPVLDSDGSFFLYSKLTVDKSRWQEGNVFSCSVMHEALHNHYTQKSLSLSP

SEQ ID NO: 1334 - protein, 328 aa, Artificial Sequence
  An artificially synthesized sequence
ASTKGPSVFPLAPSSKSTSGETAALGCLVKDYFPEPVTVSWNSGALTSGVHTFPAVLQSSGLYSLSSVVTVPSCSLRTQTYICNVNHKPSNTKVDKRVEPKSCDKTHTCPPCPAPELRRGPSVFLFPPKPKDTLMISRTPEVTCVVVDVSHEDPEVKFNWYVDGVEVHNAKTKPREEQYNSTYRVVSVLTVLHQDWLNGKEYKCKVSNKGLPSSIEKTISKAKGQPREPQVYTLPPSREEMTKNQVSLTCLVKGFYPSDIAVEWESNGQPENNYKTTPPVLDSDGSFFLYSKLTVDKSRWQEGNVFSCSVMHEALHNHYTQKSLSLSP

SEQ ID NO: 1335 - protein, 328 aa, Artificial Sequence
  An artificially synthesized sequence
ASTKGPSVFPLAPSSKSTSKGTAALGCLVKDYFPEPVTVSWNSGALTSGVHTFPAVLQSSGLYSLSSVVTVPSCSLGDQTYICNVNHKPSNTKVDKRVEPKSCDKTHTCPPCPAPELRRGPSVFLFPPKPKDTLMISRTPEVTCVVVDVSHEDPEVKFNWYVDGVEVHNAKTKPREEQYNSTYRVVSVLTVLHQDWLNGKEYKCKVSNKGLPSSIEKTISKAKGQPREPQVYTLPPSREEMTKNQVSLTCLVKGFYPSDIAVEWESNGQPENNYKTTPPVLDSDGSFFLYSKLTVDKSRWQEGNVFSCSVMHEALHNHYTQKSLSLSP

SEQ ID NO: 1336 - protein, 328 aa, Artificial Sequence
  An artificially synthesized sequence
ASTKGPSVFPLAPSSKSTSKGTAALGCLVKDYFPEPVTVSWNSGALTSGVHTFPAVLQSSGLYSLSSVVTVPSCSLGEQTYICNVNHKPSNTKVDKRVEPKSCDKTHTCPPCPAPELRRGPSVFLFPPKPKDTLMISRTPEVTCVVVDVSHEDPEVKFNWYVDGVEVHNAKTKPREEQYNSTYRVVSVLTVLHQDWLNGKEYKCKVSNKGLPSSIEKTISKAKGQPREPQVYTLPPSREEMTKNQVSLTCLVKGFYPSDIAVEWESNGQPENNYKTTPPVLDSDGSFFLYSKLTVDKSRWQEGNVFSCSVMHEALHNHYTQKSLSLSP

SEQ ID NO: 1337 - protein, 328 aa, Artificial Sequence
  An artificially synthesized sequence
ASTKGPSVFPLAPSSKSTSRGTAALGCLVKDYFPEPVTVSWNSGALTSGVHTFPAVLQSSGLYSLSSVVTVPSCSLGDQTYICNVNHKPSNTKVDKRVEPKSCDKTHTCPPCPAPELRRGPSVFLFPPKPKDTLMISRTPEVTCVVVDVSHEDPEVKFNWYVDGVEVHNAKTKPREEQYNSTYRVVSVLTVLHQDWLNGKEYKCKVSNKGLPSSIEKTISKAKGQPREPQVYTLPPSREEMTKNQVSLTCLVKGFYPSDIAVEWESNGQPENNYKTTPPVLDSDGSFFLYSKLTVDKSRWQEGNVFSCSVMHEALHNHYTQKSLSLSP

SEQ ID NO: 1338 - protein, 328 aa, Artificial Sequence
  An artificially synthesized sequence
ASTKGPSVFPLAPSSKSTSRGTAALGCLVKDYFPEPVTVSWNSGALTSGVHTFPAVLQSSGLYSLSSVVTVPSCSLGEQTYICNVNHKPSNTKVDKRVEPKSCDKTHTCPPCPAPELRRGPSVFLFPPKPKDTLMISRTPEVTCVVVDVSHEDPEVKFNWYVDGVEVHNAKTKPREEQYNSTYRVVSVLTVLHQDWLNGKEYKCKVSNKGLPSSIEKTISKAKGQPREPQVYTLPPSREEMTKNQVSLTCLVKGFYPSDIAVEWESNGQPENNYKTTPPVLDSDGSFFLYSKLTVDKSRWQEGNVFSCSVMHEALHNHYTQKSLSLSP

SEQ ID NO: 1339 - protein, 328 aa, Artificial Sequence
  An artificially synthesized sequence
ASTKGPSVFPLAPSSKSTSDGTAALGCLVKDYFPEPVTVSWNSGALTSGVHTFPAVLQSSGLYSLSSVVTVPSCSLGKQTYICNVNHKPSNTKVDKRVEPKSCDKTHTCPPCPAPELRRGPSVFLFPPKPKDTLMISRTPEVTCVVVDVSHEDPEVKFNWYVDGVEVHNAKTKPREEQYNSTYRVVSVLTVLHQDWLNGKEYKCKVSNKGLPSSIEKTISKAKGQPREPQVYTLPPSREEMTKNQVSLTCLVKGFYPSDIAVEWESNGQPENNYKTTPPVLDSDGSFFLYSKLTVDKSRWQEGNVFSCSVMHEALHNHYTQKSLSLSP

SEQ ID NO: 1340 - protein, 328 aa, Artificial Sequence
  An artificially synthesized sequence
ASTKGPSVFPLAPSSKSTSDGTAALGCLVKDYFPEPVTVSWNSGALTSGVHTFPAVLQSSGLYSLSSVVTVPSCSLGRQTYICNVNHKPSNTKVDKRVEPKSCDKTHTCPPCPAPELRRGPSVFLFPPKPKDTLMISRTPEVTCVVVDVSHEDPEVKFNWYVDGVEVHNAKTKPREEQYNSTYRVVSVLTVLHQDWLNGKEYKCKVSNKGLPSSIEKTISKAKGQPREPQVYTLPPSREEMTKNQVSLTCLVKGFYPSDIAVEWESNGQPENNYKTTPPVLDSDGSFFLYSKLTVDKSRWQEGNVFSCSVMHEALHNHYTQKSLSLSP

SEQ ID NO: 1341 - protein, 328 aa, Artificial Sequence
  An artificially synthesized sequence
ASTKGPSVFPLAPSSKSTSEGTAALGCLVKDYFPEPVTVSWNSGALTSGVHTFPAVLQSSGLYSLSSVVTVPSCSLGKQTYICNVNHKPSNTKVDKRVEPKSCDKTHTCPPCPAPELRRGPSVFLFPPKPKDTLMISRTPEVTCVVVDVSHEDPEVKFNWYVDGVEVHNAKTKPREEQYNSTYRVVSVLTVLHQDWLNGKEYKCKVSNKGLPSSIEKTISKAKGQPREPQVYTLPPSREEMTKNQVSLTCLVKGFYPSDIAVEWESNGQPENNYKTTPPVLDSDGSFFLYSKLTVDKSRWQEGNVFSCSVMHEALHNHYTQKSLSLSP

SEQ ID NO: 1342 - protein, 328 aa, Artificial Sequence
  An artificially synthesized sequence
ASTKGPSVFPLAPSSKSTSEGTAALGCLVKDYFPEPVTVSWNSGALTSGVHTFPAVLQSSGLYSLSSVVTVPSCSLGRQTYICNVNHKPSNTKVDKRVEPKSCDKTHTCPPCPAPELRRGPSVFLFPPKPKDTLMISRTPEVTCVVVDVSHEDPEVKFNWYVDGVEVHNAKTKPREEQYNSTYRVVSVLTVLHQDWLNGKEYKCKVSNKGLPSSIEKTISKAKGQPREPQVYTLPPSREEMTKNQVSLTCLVKGFYPSDIAVEWESNGQPENNYKTTPPVLDSDGSFFLYSKLTVDKSRWQEGNVFSCSVMHEALHNHYTQKSLSLSP

SEQ ID NO: 1343 - protein, 328 aa, Artificial Sequence
  An artificially synthesized sequence
ASTKGPSVFPLAPSSKSTSKGTAALGCLVKDYFPEPVTVSWNSGALTSGVHTFPAVLQSSGLYSLSSVVTVPSCSLDTQTYICNVNHKPSNTKVDKRVEPKSCDKTHTCPPCPAPELRRGPSVFLFPPKPKDTLMISRTPEVTCVVVDVSHEDPEVKFNWYVDGVEVHNAKTKPREEQYNSTYRVVSVLTVLHQDWLNGKEYKCKVSNKGLPSSIEKTISKAKGQPREPQVYTLPPSREEMTKNQVSLTCLVKGFYPSDIAVEWESNGQPENNYKTTPPVLDSDGSFFLYSKLTVDKSRWQEGNVFSCSVMHEALHNHYTQKSLSLSP

SEQ ID NO: 1344 - protein, 328 aa, Artificial Sequence
  An artificially synthesized sequence
ASTKGPSVFPLAPSSKSTSKGTAALGCLVKDYFPEPVTVSWNSGALTSGVHTFPAVLQSSGLYSLSSVVTVPSCSLETQTYICNVNHKPSNTKVDKRVEPKSCDKTHTCPPCPAPELRRGPSVFLFPPKPKDTLMISRTPEVTCVVVDVSHEDPEVKFNWYVDGVEVHNAKTKPREEQYNSTYRVVSVLTVLHQDWLNGKEYKCKVSNKGLPSSIEKTISKAKGQPREPQVYTLPPSREEMTKNQVSLTCLVKGFYPSDIAVEWESNGQPENNYKTTPPVLDSDGSFFLYSKLTVDKSRWQEGNVFSCSVMHEALHNHYTQKSLSLSP

SEQ ID NO: 1345 - protein, 328 aa, Artificial Sequence
  An artificially synthesized sequence
ASTKGPSVFPLAPSSKSTSRGTAALGCLVKDYFPEPVTVSWNSGALTSGVHTFPAVLQSSGLYSLSSVVTVPSCSLDTQTYICNVNHKPSNTKVDKRVEPKSCDKTHTCPPCPAPELRRGPSVFLFPPKPKDTLMISRTPEVTCVVVDVSHEDPEVKFNWYVDGVEVHNAKTKPREEQYNSTYRVVSVLTVLHQDWLNGKEYKCKVSNKGLPSSIEKTISKAKGQPREPQVYTLPPSREEMTKNQVSLTCLVKGFYPSDIAVEWESNGQPENNYKTTPPVLDSDGSFFLYSKLTVDKSRWQEGNVFSCSVMHEALHNHYTQKSLSLSP

SEQ ID NO: 1346 - protein, 328 aa, Artificial Sequence
  An artificially synthesized sequence
ASTKGPSVFPLAPSSKSTSRGTAALGCLVKDYFPEPVTVSWNSGALTSGVHTFPAVLQSSGLYSLSSVVTVPSCSLETQTYICNVNHKPSNTKVDKRVEPKSCDKTHTCPPCPAPELRRGPSVFLFPPKPKDTLMISRTPEVTCVVVDVSHEDPEVKFNWYVDGVEVHNAKTKPREEQYNSTYRVVSVLTVLHQDWLNGKEYKCKVSNKGLPSSIEKTISKAKGQPREPQVYTLPPSREEMTKNQVSLTCLVKGFYPSDIAVEWESNGQPENNYKTTPPVLDSDGSFFLYSKLTVDKSRWQEGNVFSCSVMHEALHNHYTQKSLSLSP

SEQ ID NO: 1347 - protein, 328 aa, Artificial Sequence
  An artificially synthesized sequence
ASTKGPSVFPLAPSSKSTSDGTAALGCLVKDYFPEPVTVSWNSGALTSGVHTFPAVLQSSGLYSLSSVVTVPSCSLKTQTYICNVNHKPSNTKVDKRVEPKSCDKTHTCPPCPAPELRRGPSVFLFPPKPKDTLMISRTPEVTCVVVDVSHEDPEVKFNWYVDGVEVHNAKTKPREEQYNSTYRVVSVLTVLHQDWLNGKEYKCKVSNKGLPSSIEKTISKAKGQPREPQVYTLPPSREEMTKNQVSLTCLVKGFYPSDIAVEWESNGQPENNYKTTPPVLDSDGSFFLYSKLTVDKSRWQEGNVFSCSVMHEALHNHYTQKSLSLSP

SEQ ID NO: 1348 - protein, 328 aa, Artificial Sequence
  An artificially synthesized sequence
ASTKGPSVFPLAPSSKSTSDGTAALGCLVKDYFPEPVTVSWNSGALTSGVHTFPAVLQSSGLYSLSSVVTVPSCSLRTQTYICNVNHKPSNTKVDKRVEPKSCDKTHTCPPCPAPELRRGPSVFLFPPKPKDTLMISRTPEVTCVVVDVSHEDPEVKFNWYVDGVEVHNAKTKPREEQYNSTYRVVSVLTVLHQDWLNGKEYKCKVSNKGLPSSIEKTISKAKGQPREPQVYTLPPSREEMTKNQVSLTCLVKGFYPSDIAVEWESNGQPENNYKTTPPVLDSDGSFFLYSKLTVDKSRWQEGNVFSCSVMHEALHNHYTQKSLSLSP

SEQ ID NO: 1349 - protein, 328 aa, Artificial Sequence
  An artificially synthesized sequence
ASTKGPSVFPLAPSSKSTSEGTAALGCLVKDYFPEPVTVSWNSGALTSGVHTFPAVLQSSGLYSLSSVVTVPSCSLKTQTYICNVNHKPSNTKVDKRVEPKSCDKTHTCPPCPAPELRRGPSVFLFPPKPKDTLMISRTPEVTCVVVDVSHEDPEVKFNWYVDGVEVHNAKTKPREEQYNSTYRVVSVLTVLHQDWLNGKEYKCKVSNKGLPSSIEKTISKAKGQPREPQVYTLPPSREEMTKNQVSLTCLVKGFYPSDIAVEWESNGQPENNYKTTPPVLDSDGSFFLYSKLTVDKSRWQEGNVFSCSVMHEALHNHYTQKSLSLSP

SEQ ID NO: 1350 - protein, 328 aa, Artificial Sequence
  An artificially synthesized sequence
ASTKGPSVFPLAPSSKSTSEGTAALGCLVKDYFPEPVTVSWNSGALTSGVHTFPAVLQSSGLYSLSSVVTVPSCSLRTQTYICNVNHKPSNTKVDKRVEPKSCDKTHTCPPCPAPELRRGPSVFLFPPKPKDTLMISRTPEVTCVVVDVSHEDPEVKFNWYVDGVEVHNAKTKPREEQYNSTYRVVSVLTVLHQDWLNGKEYKCKVSNKGLPSSIEKTISKAKGQPREPQVYTLPPSREEMTKNQVSLTCLVKGFYPSDIAVEWESNGQPENNYKTTPPVLDSDGSFFLYSKLTVDKSRWQEGNVFSCSVMHEALHNHYTQKSLSLSP

SEQ ID NO: 1351 - protein, 328 aa, Artificial Sequence
  An artificially synthesized sequence
ASTKGPSVFPLAPSSKSTSKKTAALGCLVKDYFPEPVTVSWNSGALTSGVHTFPAVLQSSGLYSLSSVVTVPSCSLEEQTYICNVNHKPSNTKVDKRVEPKSCDKTHTCPPCPAPELRRGPSVFLFPPKPKDTLMISRTPEVTCVVVDVSHEDPEVKFNWYVDGVEVHNAKTKPREEQYNSTYRVVSVLTVLHQDWLNGKEYKCKVSNKGLPSSIEKTISKAKGQPREPQVYTLPPSREEMTKNQVSLTCLVKGFYPSDIAVEWESNGQPENNYKTTPPVLDSDGSFFLYSKLTVDKSRWQEGNVFSCSVMHEALHNHYTQKSLSLSP

SEQ ID NO: 1352 - protein, 328 aa, Artificial Sequence
  An artificially synthesized sequence
ASTKGPSVFPLAPSSKSTSKKTAALGCLVKDYFPEPVTVSWNSGALTSGVHTFPAVLQSSGLYSLSSVVTVPSCSEGEQTYICNVNHKPSNTKVDKRVEPKSCDKTHTCPPCPAPELRRGPSVFLFPPKPKDTLMISRTPEVTCVVVDVSHEDPEVKFNWYVDGVEVHNAKTKPREEQYNSTYRVVSVLTVLHQDWLNGKEYKCKVSNKGLPSSIEKTISKAKGQPREPQVYTLPPSREEMTKNQVSLTCLVKGFYPSDIAVEWESNGQPENNYKTTPPVLDSDGSFFLYSKLTVDKSRWQEGNVFSCSVMHEALHNHYTQKSLSLSP

SEQ ID NO: 1353 - protein, 328 aa, Artificial Sequence
  An artificially synthesized sequence
ASTKGPSVFPLAPSSKSTKGKTAALGCLVKDYFPEPVTVSWNSGALTSGVHTFPAVLQSSGLYSLSSVVTVPSCSLEEQTYICNVNHKPSNTKVDKRVEPKSCDKTHTCPPCPAPELRRGPSVFLFPPKPKDTLMISRTPEVTCVVVDVSHEDPEVKFNWYVDGVEVHNAKTKPREEQYNSTYRVVSVLTVLHQDWLNGKEYKCKVSNKGLPSSIEKTISKAKGQPREPQVYTLPPSREEMTKNQVSLTCLVKGFYPSDIAVEWESNGQPENNYKTTPPVLDSDGSFFLYSKLTVDKSRWQEGNVFSCSVMHEALHNHYTQKSLSLSP

SEQ ID NO: 1354 - protein, 328 aa, Artificial Sequence
  An artificially synthesized sequence
ASTKGPSVFPLAPSSKSTKGKTAALGCLVKDYFPEPVTVSWNSGALTSGVHTFPAVLQSSGLYSLSSVVTVPSCSEGEQTYICNVNHKPSNTKVDKRVEPKSCDKTHTCPPCPAPELRRGPSVFLFPPKPKDTLMISRTPEVTCVVVDVSHEDPEVKFNWYVDGVEVHNAKTKPREEQYNSTYRVVSVLTVLHQDWLNGKEYKCKVSNKGLPSSIEKTISKAKGQPREPQVYTLPPSREEMTKNQVSLTCLVKGFYPSDIAVEWESNGQPENNYKTTPPVLDSDGSFFLYSKLTVDKSRWQEGNVFSCSVMHEALHNHYTQKSLSLSP

SEQ ID NO: 1355 - protein, 328 aa, Artificial Sequence
  An artificially synthesized sequence
ASTKGPSVFPLAPSSKSTKKGTAALGCLVKDYFPEPVTVSWNSGALTSGVHTFPAVLQSSGLYSLSSVVTVPSCSLEEQTYICNVNHKPSNTKVDKRVEPKSCDKTHTCPPCPAPELRRGPSVFLFPPKPKDTLMISRTPEVTCVVVDVSHEDPEVKFNWYVDGVEVHNAKTKPREEQYNSTYRVVSVLTVLHQDWLNGKEYKCKVSNKGLPSSIEKTISKAKGQPREPQVYTLPPSREEMTKNQVSLTCLVKGFYPSDIAVEWESNGQPENNYKTTPPVLDSDGSFFLYSKLTVDKSRWQEGNVFSCSVMHEALHNHYTQKSLSLSP

SEQ ID NO: 1356 - protein, 328 aa, Artificial Sequence
  An artificially synthesized sequence
ASTKGPSVFPLAPSSKSTKKGTAALGCLVKDYFPEPVTVSWNSGALTSGVHTFPAVLQSSGLYSLSSVVTVPSCSEGEQTYICNVNHKPSNTKVDKRVEPKSCDKTHTCPPCPAPELRRGPSVFLFPPKPKDTLMISRTPEVTCVVVDVSHEDPEVKFNWYVDGVEVHNAKTKPREEQYNSTYRVVSVLTVLHQDWLNGKEYKCKVSNKGLPSSIEKTISKAKGQPREPQVYTLPPSREEMTKNQVSLTCLVKGFYPSDIAVEWESNGQPENNYKTTPPVLDSDGSFFLYSKLTVDKSRWQEGNVFSCSVMHEALHNHYTQKSLSLSP

SEQ ID NO: 1357 - protein, 328 aa, Artificial Sequence
  An artificially synthesized sequence
ASTKGPSVFPLAPSSKSTKGGTAALGCLVKDYFPEPVTVSWNSGALTSGVHTFPAVLQSSGLYSLSSVVTVPSCSLEEQTYICNVNHKPSNTKVDKRVEPKSCDKTHTCPPCPAPELRRGPSVFLFPPKPKDTLMISRTPEVTCVVVDVSHEDPEVKFNWYVDGVEVHNAKTKPREEQYNSTYRVVSVLTVLHQDWLNGKEYKCKVSNKGLPSSIEKTISKAKGQPREPQVYTLPPSREEMTKNQVSLTCLVKGFYPSDIAVEWESNGQPENNYKTTPPVLDSDGSFFLYSKLTVDKSRWQEGNVFSCSVMHEALHNHYTQKSLSLSP

SEQ ID NO: 1358 - protein, 328 aa, Artificial Sequence
  An artificially synthesized sequence
ASTKGPSVFPLAPSSKSTKGGTAALGCLVKDYFPEPVTVSWNSGALTSGVHTFPAVLQSSGLYSLSSVVTVPSCSEGEQTYICNVNHKPSNTKVDKRVEPKSCDKTHTCPPCPAPELRRGPSVFLFPPKPKDTLMISRTPEVTCVVVDVSHEDPEVKFNWYVDGVEVHNAKTKPREEQYNSTYRVVSVLTVLHQDWLNGKEYKCKVSNKGLPSSIEKTISKAKGQPREPQVYTLPPSREEMTKNQVSLTCLVKGFYPSDIAVEWESNGQPENNYKTTPPVLDSDGSFFLYSKLTVDKSRWQEGNVFSCSVMHEALHNHYTQKSLSLSP

SEQ ID NO: 1359 - protein, 328 aa, Artificial Sequence
  An artificially synthesized sequence
ASTKGPSVFPLAPSSKSTSKGTAALGCLVKDYFPEPVTVSWNSGALTSGVHTFPAVLQSSGLYSLSSVVTVPSCSLEEQTYICNVNHKPSNTKVDKRVEPKSCDKTHTCPPCPAPELRRGPSVFLFPPKPKDTLMISRTPEVTCVVVDVSHEDPEVKFNWYVDGVEVHNAKTKPREEQYNSTYRVVSVLTVLHQDWLNGKEYKCKVSNKGLPSSIEKTISKAKGQPREPQVYTLPPSREEMTKNQVSLTCLVKGFYPSDIAVEWESNGQPENNYKTTPPVLDSDGSFFLYSKLTVDKSRWQEGNVFSCSVMHEALHNHYTQKSLSLSP

SEQ ID NO: 1360 - protein, 328 aa, Artificial Sequence
  An artificially synthesized sequence
ASTKGPSVFPLAPSSKSTSKGTAALGCLVKDYFPEPVTVSWNSGALTSGVHTFPAVLQSSGLYSLSSVVTVPSCSEGEQTYICNVNHKPSNTKVDKRVEPKSCDKTHTCPPCPAPELRRGPSVFLFPPKPKDTLMISRTPEVTCVVVDVSHEDPEVKFNWYVDGVEVHNAKTKPREEQYNSTYRVVSVLTVLHQDWLNGKEYKCKVSNKGLPSSIEKTISKAKGQPREPQVYTLPPSREEMTKNQVSLTCLVKGFYPSDIAVEWESNGQPENNYKTTPPVLDSDGSFFLYSKLTVDKSRWQEGNVFSCSVMHEALHNHYTQKSLSLSP

SEQ ID NO: 1361 - protein, 328 aa, Artificial Sequence
  An artificially synthesized sequence
ASTKGPSVFPLAPSSKSTSGKTAALGCLVKDYFPEPVTVSWNSGALTSGVHTFPAVLQSSGLYSLSSVVTVPSCSLEEQTYICNVNHKPSNTKVDKRVEPKSCDKTHTCPPCPAPELRRGPSVFLFPPKPKDTLMISRTPEVTCVVVDVSHEDPEVKFNWYVDGVEVHNAKTKPREEQYNSTYRVVSVLTVLHQDWLNGKEYKCKVSNKGLPSSIEKTISKAKGQPREPQVYTLPPSREEMTKNQVSLTCLVKGFYPSDIAVEWESNGQPENNYKTTPPVLDSDGSFFLYSKLTVDKSRWQEGNVFSCSVMHEALHNHYTQKSLSLSP

SEQ ID NO: 1362 - protein, 328 aa, Artificial Sequence
  An artificially synthesized sequence
ASTKGPSVFPLAPSSKSTSGKTAALGCLVKDYFPEPVTVSWNSGALTSGVHTFPAVLQSSGLYSLSSVVTVPSCSEGEQTYICNVNHKPSNTKVDKRVEPKSCDKTHTCPPCPAPELRRGPSVFLFPPKPKDTLMISRTPEVTCVVVDVSHEDPEVKFNWYVDGVEVHNAKTKPREEQYNSTYRVVSVLTVLHQDWLNGKEYKCKVSNKGLPSSIEKTISKAKGQPREPQVYTLPPSREEMTKNQVSLTCLVKGFYPSDIAVEWESNGQPENNYKTTPPVLDSDGSFFLYSKLTVDKSRWQEGNVFSCSVMHEALHNHYTQKSLSLSP

SEQ ID NO: 1363 - protein, 328 aa, Artificial Sequence
  An artificially synthesized sequence
ASTKGPSVFPLAPSSKSTSRRTAALGCLVKDYFPEPVTVSWNSGALTSGVHTFPAVLQSSGLYSLSSVVTVPSCSLDDQTYICNVNHKPSNTKVDKRVEPKSCDKTHTCPPCPAPELRRGPSVFLFPPKPKDTLMISRTPEVTCVVVDVSHEDPEVKFNWYVDGVEVHNAKTKPREEQYNSTYRVVSVLTVLHQDWLNGKEYKCKVSNKGLPSSIEKTISKAKGQPREPQVYTLPPSREEMTKNQVSLTCLVKGFYPSDIAVEWESNGQPENNYKTTPPVLDSDGSFFLYSKLTVDKSRWQEGNVFSCSVMHEALHNHYTQKSLSLSP

SEQ ID NO: 1364 - protein, 328 aa, Artificial Sequence
  An artificially synthesized sequence
ASTKGPSVFPLAPSSKSTSRRTAALGCLVKDYFPEPVTVSWNSGALTSGVHTFPAVLQSSGLYSLSSVVTVPSCSDGDQTYICNVNHKPSNTKVDKRVEPKSCDKTHTCPPCPAPELRRGPSVFLFPPKPKDTLMISRTPEVTCVVVDVSHEDPEVKFNWYVDGVEVHNAKTKPREEQYNSTYRVVSVLTVLHQDWLNGKEYKCKVSNKGLPSSIEKTISKAKGQPREPQVYTLPPSREEMTKNQVSLTCLVKGFYPSDIAVEWESNGQPENNYKTTPPVLDSDGSFFLYSKLTVDKSRWQEGNVFSCSVMHEALHNHYTQKSLSLSP

SEQ ID NO: 1365 - protein, 328 aa, Artificial Sequence
  An artificially synthesized sequence
ASTKGPSVFPLAPSSKSTRGRTAALGCLVKDYFPEPVTVSWNSGALTSGVHTFPAVLQSSGLYSLSSVVTVPSCSLDDQTYICNVNHKPSNTKVDKRVEPKSCDKTHTCPPCPAPELRRGPSVFLFPPKPKDTLMISRTPEVTCVVVDVSHEDPEVKFNWYVDGVEVHNAKTKPREEQYNSTYRVVSVLTVLHQDWLNGKEYKCKVSNKGLPSSIEKTISKAKGQPREPQVYTLPPSREEMTKNQVSLTCLVKGFYPSDIAVEWESNGQPENNYKTTPPVLDSDGSFFLYSKLTVDKSRWQEGNVFSCSVMHEALHNHYTQKSLSLSP

SEQ ID NO: 1366 - protein, 328 aa, Artificial Sequence
  An artificially synthesized sequence
ASTKGPSVFPLAPSSKSTRGRTAALGCLVKDYFPEPVTVSWNSGALTSGVHTFPAVLQSSGLYSLSSVVTVPSCSDGDQTYICNVNHKPSNTKVDKRVEPKSCDKTHTCPPCPAPELRRGPSVFLFPPKPKDTLMISRTPEVTCVVVDVSHEDPEVKFNWYVDGVEVHNAKTKPREEQYNSTYRVVSVLTVLHQDWLNGKEYKCKVSNKGLPSSIEKTISKAKGQPREPQVYTLPPSREEMTKNQVSLTCLVKGFYPSDIAVEWESNGQPENNYKTTPPVLDSDGSFFLYSKLTVDKSRWQEGNVFSCSVMHEALHNHYTQKSLSLSP

SEQ ID NO: 1367 - protein, 328 aa, Artificial Sequence
  An artificially synthesized sequence
ASTKGPSVFPLAPSSKSTRRGTAALGCLVKDYFPEPVTVSWNSGALTSGVHTFPAVLQSSGLYSLSSVVTVPSCSLDDQTYICNVNHKPSNTKVDKRVEPKSCDKTHTCPPCPAPELRRGPSVFLFPPKPKDTLMISRTPEVTCVVVDVSHEDPEVKFNWYVDGVEVHNAKTKPREEQYNSTYRVVSVLTVLHQDWLNGKEYKCKVSNKGLPSSIEKTISKAKGQPREPQVYTLPPSREEMTKNQVSLTCLVKGFYPSDIAVEWESNGQPENNYKTTPPVLDSDGSFFLYSKLTVDKSRWQEGNVFSCSVMHEALHNHYTQKSLSLSP

SEQ ID NO: 1368 - protein, 328 aa, Artificial Sequence
  An artificially synthesized sequence
ASTKGPSVFPLAPSSKSTRRGTAALGCLVKDYFPEPVTVSWNSGALTSGVHTFPAVLQSSGLYSLSSVVTVPSCSDGDQTYICNVNHKPSNTKVDKRVEPKSCDKTHTCPPCPAPELRRGPSVFLFPPKPKDTLMISRTPEVTCVVVDVSHEDPEVKFNWYVDGVEVHNAKTKPREEQYNSTYRVVSVLTVLHQDWLNGKEYKCKVSNKGLPSSIEKTISKAKGQPREPQVYTLPPSREEMTKNQVSLTCLVKGFYPSDIAVEWESNGQPENNYKTTPPVLDSDGSFFLYSKLTVDKSRWQEGNVFSCSVMHEALHNHYTQKSLSLSP

SEQ ID NO: 1369 - protein, 328 aa, Artificial Sequence
  An artificially synthesized sequence
ASTKGPSVFPLAPSSKSTRGGTAALGCLVKDYFPEPVTVSWNSGALTSGVHTFPAVLQSSGLYSLSSVVTVPSCSLDDQTYICNVNHKPSNTKVDKRVEPKSCDKTHTCPPCPAPELRRGPSVFLFPPKPKDTLMISRTPEVTCVVVDVSHEDPEVKFNWYVDGVEVHNAKTKPREEQYNSTYRVVSVLTVLHQDWLNGKEYKCKVSNKGLPSSIEKTISKAKGQPREPQVYTLPPSREEMTKNQVSLTCLVKGFYPSDIAVEWESNGQPENNYKTTPPVLDSDGSFFLYSKLTVDKSRWQEGNVFSCSVMHEALHNHYTQKSLSLSP

SEQ ID NO: 1370 - protein, 328 aa, Artificial Sequence
  An artificially synthesized sequence
ASTKGPSVFPLAPSSKSTRGGTAALGCLVKDYFPEPVTVSWNSGALTSGVHTFPAVLQSSGLYSLSSVVTVPSCSDGDQTYICNVNHKPSNTKVDKRVEPKSCDKTHTCPPCPAPELRRGPSVFLFPPKPKDTLMISRTPEVTCVVVDVSHEDPEVKFNWYVDGVEVHNAKTKPREEQYNSTYRVVSVLTVLHQDWLNGKEYKCKVSNKGLPSSIEKTISKAKGQPREPQVYTLPPSREEMTKNQVSLTCLVKGFYPSDIAVEWESNGQPENNYKTTPPVLDSDGSFFLYSKLTVDKSRWQEGNVFSCSVMHEALHNHYTQKSLSLSP

SEQ ID NO: 1371 - protein, 328 aa, Artificial Sequence
  An artificially synthesized sequence
ASTKGPSVFPLAPSSKSTSRGTAALGCLVKDYFPEPVTVSWNSGALTSGVHTFPAVLQSSGLYSLSSVVTVPSCSLDDQTYICNVNHKPSNTKVDKRVEPKSCDKTHTCPPCPAPELRRGPSVFLFPPKPKDTLMISRTPEVTCVVVDVSHEDPEVKFNWYVDGVEVHNAKTKPREEQYNSTYRVVSVLTVLHQDWLNGKEYKCKVSNKGLPSSIEKTISKAKGQPREPQVYTLPPSREEMTKNQVSLTCLVKGFYPSDIAVEWESNGQPENNYKTTPPVLDSDGSFFLYSKLTVDKSRWQEGNVFSCSVMHEALHNHYTQKSLSLSP

SEQ ID NO: 1372 - protein, 328 aa, Artificial Sequence
  An artificially synthesized sequence
ASTKGPSVFPLAPSSKSTSRGTAALGCLVKDYFPEPVTVSWNSGALTSGVHTFPAVLQSSGLYSLSSVVTVPSCSDGDQTYICNVNHKPSNTKVDKRVEPKSCDKTHTCPPCPAPELRRGPSVFLFPPKPKDTLMISRTPEVTCVVVDVSHEDPEVKFNWYVDGVEVHNAKTKPREEQYNSTYRVVSVLTVLHQDWLNGKEYKCKVSNKGLPSSIEKTISKAKGQPREPQVYTLPPSREEMTKNQVSLTCLVKGFYPSDIAVEWESNGQPENNYKTTPPVLDSDGSFFLYSKLTVDKSRWQEGNVFSCSVMHEALHNHYTQKSLSLSP

SEQ ID NO: 1373 - protein, 328 aa, Artificial Sequence
  An artificially synthesized sequence
ASTKGPSVFPLAPSSKSTSGRTAALGCLVKDYFPEPVTVSWNSGALTSGVHTFPAVLQSSGLYSLSSVVTVPSCSLDDQTYICNVNHKPSNTKVDKRVEPKSCDKTHTCPPCPAPELRRGPSVFLFPPKPKDTLMISRTPEVTCVVVDVSHEDPEVKFNWYVDGVEVHNAKTKPREEQYNSTYRVVSVLTVLHQDWLNGKEYKCKVSNKGLPSSIEKTISKAKGQPREPQVYTLPPSREEMTKNQVSLTCLVKGFYPSDIAVEWESNGQPENNYKTTPPVLDSDGSFFLYSKLTVDKSRWQEGNVFSCSVMHEALHNHYTQKSLSLSP

SEQ ID NO: 1374 - protein, 328 aa, Artificial Sequence
  An artificially synthesized sequence
ASTKGPSVFPLAPSSKSTSGRTAALGCLVKDYFPEPVTVSWNSGALTSGVHTFPAVLQSSGLYSLSSVVTVPSCSDGDQTYICNVNHKPSNTKVDKRVEPKSCDKTHTCPPCPAPELRRGPSVFLFPPKPKDTLMISRTPEVTCVVVDVSHEDPEVKFNWYVDGVEVHNAKTKPREEQYNSTYRVVSVLTVLHQDWLNGKEYKCKVSNKGLPSSIEKTISKAKGQPREPQVYTLPPSREEMTKNQVSLTCLVKGFYPSDIAVEWESNGQPENNYKTTPPVLDSDGSFFLYSKLTVDKSRWQEGNVFSCSVMHEALHNHYTQKSLSLSP

SEQ ID NO: 1375 - protein, 328 aa, Artificial Sequence
  An artificially synthesized sequence
ASTKGPSVFPLAPSSKSTKGGTAALGCLVKDYFPEPVTVSWNSGALTSGVHTFPAVLQSSGLYSLSSVVTVPSCSLGDQTYICNVNHKPSNTKVDKRVEPKSCDKTHTCPPCPAPELRRGPSVFLFPPKPKDTLMISRTPEVTCVVVDVSHEDPEVKFNWYVDGVEVHNAKTKPREEQYNSTYRVVSVLTVLHQDWLNGKEYKCKVSNKGLPSSIEKTISKAKGQPREPQVYTLPPSREEMTKNQVSLTCLVKGFYPSDIAVEWESNGQPENNYKTTPPVLDSDGSFFLYSKLTVDKSRWQEGNVFSCSVMHEALHNHYTQKSLSLSP

SEQ ID NO: 1376 - protein, 328 aa, Artificial Sequence
  An artificially synthesized sequence
ASTKGPSVFPLAPSSKSTKGGTAALGCLVKDYFPEPVTVSWNSGALTSGVHTFPAVLQSSGLYSLSSVVTVPSCSLGEQTYICNVNHKPSNTKVDKRVEPKSCDKTHTCPPCPAPELRRGPSVFLFPPKPKDTLMISRTPEVTCVVVDVSHEDPEVKFNWYVDGVEVHNAKTKPREEQYNSTYRVVSVLTVLHQDWLNGKEYKCKVSNKGLPSSIEKTISKAKGQPREPQVYTLPPSREEMTKNQVSLTCLVKGFYPSDIAVEWESNGQPENNYKTTPPVLDSDGSFFLYSKLTVDKSRWQEGNVFSCSVMHEALHNHYTQKSLSLSP

SEQ ID NO: 1377 - protein, 328 aa, Artificial Sequence
  An artificially synthesized sequence
ASTKGPSVFPLAPSSKSTRGGTAALGCLVKDYFPEPVTVSWNSGALTSGVHTFPAVLQSSGLYSLSSVVTVPSCSLGDQTYICNVNHKPSNTKVDKRVEPKSCDKTHTCPPCPAPELRRGPSVFLFPPKPKDTLMISRTPEVTCVVVDVSHEDPEVKFNWYVDGVEVHNAKTKPREEQYNSTYRVVSVLTVLHQDWLNGKEYKCKVSNKGLPSSIEKTISKAKGQPREPQVYTLPPSREEMTKNQVSLTCLVKGFYPSDIAVEWESNGQPENNYKTTPPVLDSDGSFFLYSKLTVDKSRWQEGNVFSCSVMHEALHNHYTQKSLSLSP

SEQ ID NO: 1378 - protein, 328 aa, Artificial Sequence
  An artificially synthesized sequence
ASTKGPSVFPLAPSSKSTRGGTAALGCLVKDYFPEPVTVSWNSGALTSGVHTFPAVLQSSGLYSLSSVVTVPSCSLGEQTYICNVNHKPSNTKVDKRVEPKSCDKTHTCPPCPAPELRRGPSVFLFPPKPKDTLMISRTPEVTCVVVDVSHEDPEVKFNWYVDGVEVHNAKTKPREEQYNSTYRVVSVLTVLHQDWLNGKEYKCKVSNKGLPSSIEKTISKAKGQPREPQVYTLPPSREEMTKNQVSLTCLVKGFYPSDIAVEWESNGQPENNYKTTPPVLDSDGSFFLYSKLTVDKSRWQEGNVFSCSVMHEALHNHYTQKSLSLSP

SEQ ID NO: 1379 - protein, 328 aa, Artificial Sequence
  An artificially synthesized sequence
ASTKGPSVFPLAPSSKSTDGGTAALGCLVKDYFPEPVTVSWNSGALTSGVHTFPAVLQSSGLYSLSSVVTVPSCSLGKQTYICNVNHKPSNTKVDKRVEPKSCDKTHTCPPCPAPELRRGPSVFLFPPKPKDTLMISRTPEVTCVVVDVSHEDPEVKFNWYVDGVEVHNAKTKPREEQYNSTYRVVSVLTVLHQDWLNGKEYKCKVSNKGLPSSIEKTISKAKGQPREPQVYTLPPSREEMTKNQVSLTCLVKGFYPSDIAVEWESNGQPENNYKTTPPVLDSDGSFFLYSKLTVDKSRWQEGNVFSCSVMHEALHNHYTQKSLSLSP

SEQ ID NO: 1380 - protein, 328 aa, Artificial Sequence
  An artificially synthesized sequence
ASTKGPSVFPLAPSSKSTDGGTAALGCLVKDYFPEPVTVSWNSGALTSGVHTFPAVLQSSGLYSLSSVVTVPSCSLGRQTYICNVNHKPSNTKVDKRVEPKSCDKTHTCPPCPAPELRRGPSVFLFPPKPKDTLMISRTPEVTCVVVDVSHEDPEVKFNWYVDGVEVHNAKTKPREEQYNSTYRVVSVLTVLHQDWLNGKEYKCKVSNKGLPSSIEKTISKAKGQPREPQVYTLPPSREEMTKNQVSLTCLVKGFYPSDIAVEWESNGQPENNYKTTPPVLDSDGSFFLYSKLTVDKSRWQEGNVFSCSVMHEALHNHYTQKSLSLSP

SEQ ID NO: 1381 - protein, 328 aa, Artificial Sequence
  An artificially synthesized sequence
ASTKGPSVFPLAPSSKSTEGGTAALGCLVKDYFPEPVTVSWNSGALTSGVHTFPAVLQSSGLYSLSSVVTVPSCSLGKQTYICNVNHKPSNTKVDKRVEPKSCDKTHTCPPCPAPELRRGPSVFLFPPKPKDTLMISRTPEVTCVVVDVSHEDPEVKFNWYVDGVEVHNAKTKPREEQYNSTYRVVSVLTVLHQDWLNGKEYKCKVSNKGLPSSIEKTISKAKGQPREPQVYTLPPSREEMTKNQVSLTCLVKGFYPSDIAVEWESNGQPENNYKTTPPVLDSDGSFFLYSKLTVDKSRWQEGNVFSCSVMHEALHNHYTQKSLSLSP

SEQ ID NO: 1382 - protein, 328 aa, Artificial Sequence
  An artificially synthesized sequence
ASTKGPSVFPLAPSSKSTEGGTAALGCLVKDYFPEPVTVSWNSGALTSGVHTFPAVLQSSGLYSLSSVVTVPSCSLGRQTYICNVNHKPSNTKVDKRVEPKSCDKTHTCPPCPAPELRRGPSVFLFPPKPKDTLMISRTPEVTCVVVDVSHEDPEVKFNWYVDGVEVHNAKTKPREEQYNSTYRVVSVLTVLHQDWLNGKEYKCKVSNKGLPSSIEKTISKAKGQPREPQVYTLPPSREEMTKNQVSLTCLVKGFYPSDIAVEWESNGQPENNYKTTPPVLDSDGSFFLYSKLTVDKSRWQEGNVFSCSVMHEALHNHYTQKSLSLSP

SEQ ID NO: 1383 - protein, 328 aa, Artificial Sequence
  An artificially synthesized sequence
ASTKGPSVFPLAPSSKSTKGGTAALGCLVKDYFPEPVTVSWNSGALTSGVHTFPAVLQSSGLYSLSSVVTVPSCSLDTQTYICNVNHKPSNTKVDKRVEPKSCDKTHTCPPCPAPELRRGPSVFLFPPKPKDTLMISRTPEVTCVVVDVSHEDPEVKFNWYVDGVEVHNAKTKPREEQYNSTYRVVSVLTVLHQDWLNGKEYKCKVSNKGLPSSIEKTISKAKGQPREPQVYTLPPSREEMTKNQVSLTCLVKGFYPSDIAVEWESNGQPENNYKTTPPVLDSDGSFFLYSKLTVDKSRWQEGNVFSCSVMHEALHNHYTQKSLSLSP

SEQ ID NO: 1384 - protein, 328 aa, Artificial Sequence
  An artificially synthesized sequence
ASTKGPSVFPLAPSSKSTKGGTAALGCLVKDYFPEPVTVSWNSGALTSGVHTFPAVLQSSGLYSLSSVVTVPSCSLETQTYICNVNHKPSNTKVDKRVEPKSCDKTHTCPPCPAPELRRGPSVFLFPPKPKDTLMISRTPEVTCVVVDVSHEDPEVKFNWYVDGVEVHNAKTKPREEQYNSTYRVVSVLTVLHQDWLNGKEYKCKVSNKGLPSSIEKTISKAKGQPREPQVYTLPPSREEMTKNQVSLTCLVKGFYPSDIAVEWESNGQPENNYKTTPPVLDSDGSFFLYSKLTVDKSRWQEGNVFSCSVMHEALHNHYTQKSLSLSP

SEQ ID NO: 1385 - protein, 328 aa, Artificial Sequence
  An artificially synthesized sequence
ASTKGPSVFPLAPSSKSTRGGTAALGCLVKDYFPEPVTVSWNSGALTSGVHTFPAVLQSSGLYSLSSVVTVPSCSLDTQTYICNVNHKPSNTKVDKRVEPKSCDKTHTCPPCPAPELRRGPSVFLFPPKPKDTLMISRTPEVTCVVVDVSHEDPEVKFNWYVDGVEVHNAKTKPREEQYNSTYRVVSVLTVLHQDWLNGKEYKCKVSNKGLPSSIEKTISKAKGQPREPQVYTLPPSREEMTKNQVSLTCLVKGFYPSDIAVEWESNGQPENNYKTTPPVLDSDGSFFLYSKLTVDKSRWQEGNVFSCSVMHEALHNHYTQKSLSLSP

SEQ ID NO: 1386 - protein, 328 aa, Artificial Sequence
  An artificially synthesized sequence
ASTKGPSVFPLAPSSKSTRGGTAALGCLVKDYFPEPVTVSWNSGALTSGVHTFPAVLQSSGLYSLSSVVTVPSCSLETQTYICNVNHKPSNTKVDKRVEPKSCDKTHTCPPCPAPELRRGPSVFLFPPKPKDTLMISRTPEVTCVVVDVSHEDPEVKFNWYVDGVEVHNAKTKPREEQYNSTYRVVSVLTVLHQDWLNGKEYKCKVSNKGLPSSIEKTISKAKGQPREPQVYTLPPSREEMTKNQVSLTCLVKGFYPSDIAVEWESNGQPENNYKTTPPVLDSDGSFFLYSKLTVDKSRWQEGNVFSCSVMHEALHNHYTQKSLSLSP

SEQ ID NO: 1387 - protein, 328 aa, Artificial Sequence
  An artificially synthesized sequence
ASTKGPSVFPLAPSSKSTDGGTAALGCLVKDYFPEPVTVSWNSGALTSGVHTFPAVLQSSGLYSLSSVVTVPSCSLKTQTYICNVNHKPSNTKVDKRVEPKSCDKTHTCPPCPAPELRRGPSVFLFPPKPKDTLMISRTPEVTCVVVDVSHEDPEVKFNWYVDGVEVHNAKTKPREEQYNSTYRVVSVLTVLHQDWLNGKEYKCKVSNKGLPSSIEKTISKAKGQPREPQVYTLPPSREEMTKNQVSLTCLVKGFYPSDIAVEWESNGQPENNYKTTPPVLDSDGSFFLYSKLTVDKSRWQEGNVFSCSVMHEALHNHYTQKSLSLSP

SEQ ID NO: 1388 - protein, 328 aa, Artificial Sequence
  An artificially synthesized sequence
ASTKGPSVFPLAPSSKSTDGGTAALGCLVKDYFPEPVTVSWNSGALTSGVHTFPAVLQSSGLYSLSSVVTVPSCSLRTQTYICNVNHKPSNTKVDKRVEPKSCDKTHTCPPCPAPELRRGPSVFLFPPKPKDTLMISRTPEVTCVVVDVSHEDPEVKFNWYVDGVEVHNAKTKPREEQYNSTYRVVSVLTVLHQDWLNGKEYKCKVSNKGLPSSIEKTISKAKGQPREPQVYTLPPSREEMTKNQVSLTCLVKGFYPSDIAVEWESNGQPENNYKTTPPVLDSDGSFFLYSKLTVDKSRWQEGNVFSCSVMHEALHNHYTQKSLSLSP

SEQ ID NO: 1389 - protein, 328 aa, Artificial Sequence
  An artificially synthesized sequence
ASTKGPSVFPLAPSSKSTEGGTAALGCLVKDYFPEPVTVSWNSGALTSGVHTFPAVLQSSGLYSLSSVVTVPSCSLKTQTYICNVNHKPSNTKVDKRVEPKSCDKTHTCPPCPAPELRRGPSVFLFPPKPKDTLMISRTPEVTCVVVDVSHEDPEVKFNWYVDGVEVHNAKTKPREEQYNSTYRVVSVLTVLHQDWLNGKEYKCKVSNKGLPSSIEKTISKAKGQPREPQVYTLPPSREEMTKNQVSLTCLVKGFYPSDIAVEWESNGQPENNYKTTPPVLDSDGSFFLYSKLTVDKSRWQEGNVFSCSVMHEALHNHYTQKSLSLSP

SEQ ID NO: 1390 - protein, 328 aa, Artificial Sequence
  An artificially synthesized sequence
ASTKGPSVFPLAPSSKSTEGGTAALGCLVKDYFPEPVTVSWNSGALTSGVHTFPAVLQSSGLYSLSSVVTVPSCSLRTQTYICNVNHKPSNTKVDKRVEPKSCDKTHTCPPCPAPELRRGPSVFLFPPKPKDTLMISRTPEVTCVVVDVSHEDPEVKFNWYVDGVEVHNAKTKPREEQYNSTYRVVSVLTVLHQDWLNGKEYKCKVSNKGLPSSIEKTISKAKGQPREPQVYTLPPSREEMTKNQVSLTCLVKGFYPSDIAVEWESNGQPENNYKTTPPVLDSDGSFFLYSKLTVDKSRWQEGNVFSCSVMHEALHNHYTQKSLSLSP

SEQ ID NO: 1391 - protein, 328 aa, Artificial Sequence
  An artificially synthesized sequence
ASTKGPSVFPLAPSSKSTWWWTAALGCLVKDYFPEPVTVSWNSGALTSGVHTFPAVLQSSGLYSLSSVVTVPSCSWWWQTYICNVNHKPSNTKVDKRVEPKSCDKTHTCPPCPAPELRRGPSVFLFPPKPKDTLMISRTPEVTCVVVDVSHEDPEVKFNWYVDGVEVHNAKTKPREEQYNSTYRVVSVLTVLHQDWLNGKEYKCKVSNKGLPSSIEKTISKAKGQPREPQVYTLPPSREEMTKNQVSLTCLVKGFYPSDIAVEWESNGQPENNYKTTPPVLDSDGSFFLYSKLTVDKSRWQEGNVFSCSVMHEALHNHYTQKSLSLSP

SEQ ID NO: 1392 - protein, 328 aa, Artificial Sequence
  An artificially synthesized sequence
ASTKGPSVFPLAPSSKSTLLLTAALGCLVKDYFPEPVTVSWNSGALTSGVHTFPAVLQSSGLYSLSSVVTVPSCSLLLQTYICNVNHKPSNTKVDKRVEPKSCDKTHTCPPCPAPELRRGPSVFLFPPKPKDTLMISRTPEVTCVVVDVSHEDPEVKFNWYVDGVEVHNAKTKPREEQYNSTYRVVSVLTVLHQDWLNGKEYKCKVSNKGLPSSIEKTISKAKGQPREPQVYTLPPSREEMTKNQVSLTCLVKGFYPSDIAVEWESNGQPENNYKTTPPVLDSDGSFFLYSKLTVDKSRWQEGNVFSCSVMHEALHNHYTQKSLSLSP

SEQ ID NO: 1393 - protein, 328 aa, Artificial Sequence
  An artificially synthesized sequence
ASTKGPSVFPLAPSSKSTVVVTAALGCLVKDYFPEPVTVSWNSGALTSGVHTFPAVLQSSGLYSLSSVVTVPSCSVVVQTYICNVNHKPSNTKVDKRVEPKSCDKTHTCPPCPAPELRRGPSVFLFPPKPKDTLMISRTPEVTCVVVDVSHEDPEVKFNWYVDGVEVHNAKTKPREEQYNSTYRVVSVLTVLHQDWLNGKEYKCKVSNKGLPSSIEKTISKAKGQPREPQVYTLPPSREEMTKNQVSLTCLVKGFYPSDIAVEWESNGQPENNYKTTPPVLDSDGSFFLYSKLTVDKSRWQEGNVFSCSVMHEALHNHYTQKSLSLSP

SEQ ID NO: 1394 - protein, 328 aa, Artificial Sequence
  An artificially synthesized sequence
ASTKGPSVFPLAPSSKSTAAATAALGCLVKDYFPEPVTVSWNSGALTSGVHTFPAVLQSSGLYSLSSVVTVPSCSAAAQTYICNVNHKPSNTKVDKRVEPKSCDKTHTCPPCPAPELRRGPSVFLFPPKPKDTLMISRTPEVTCVVVDVSHEDPEVKFNWYVDGVEVHNAKTKPREEQYNSTYRVVSVLTVLHQDWLNGKEYKCKVSNKGLPSSIEKTISKAKGQPREPQVYTLPPSREEMTKNQVSLTCLVKGFYPSDIAVEWESNGQPENNYKTTPPVLDSDGSFFLYSKLTVDKSRWQEGNVFSCSVMHEALHNHYTQKSLSLSP

SEQ ID NO: 1395 - protein, 328 aa, Artificial Sequence
  An artificially synthesized sequence
ASTKGPSVFPLAPSSKSTVVVTAALGCLVKDYFPEPVTVSWNSGALTSGVHTFPAVLQSSGLYSLSSVVTVPSCSWWWQTYICNVNHKPSNTKVDKRVEPKSCDKTHTCPPCPAPELRRGPSVFLFPPKPKDTLMISRTPEVTCVVVDVSHEDPEVKFNWYVDGVEVHNAKTKPREEQYNSTYRVVSVLTVLHQDWLNGKEYKCKVSNKGLPSSIEKTISKAKGQPREPQVYTLPPSREEMTKNQVSLTCLVKGFYPSDIAVEWESNGQPENNYKTTPPVLDSDGSFFLYSKLTVDKSRWQEGNVFSCSVMHEALHNHYTQKSLSLSP

SEQ ID NO: 1396 - protein, 328 aa, Artificial Sequence
  An artificially synthesized sequence
ASTKGPSVFPLAPSSKSTWWWTAALGCLVKDYFPEPVTVSWNSGALTSGVHTFPAVLQSSGLYSLSSVVTVPSCSVVVQTYICNVNHKPSNTKVDKRVEPKSCDKTHTCPPCPAPELRRGPSVFLFPPKPKDTLMISRTPEVTCVVVDVSHEDPEVKFNWYVDGVEVHNAKTKPREEQYNSTYRVVSVLTVLHQDWLNGKEYKCKVSNKGLPSSIEKTISKAKGQPREPQVYTLPPSREEMTKNQVSLTCLVKGFYPSDIAVEWESNGQPENNYKTTPPVLDSDGSFFLYSKLTVDKSRWQEGNVFSCSVMHEALHNHYTQKSLSLSP

SEQ ID NO: 1397 - protein, 328 aa, Artificial Sequence
  An artificially synthesized sequence
ASTKGPSVFPLAPSSKSTVVVTAALGCLVKDYFPEPVTVSWNSGALTSGVHTFPAVLQSSGLYSLSSVVTVPSCSLLLQTYICNVNHKPSNTKVDKRVEPKSCDKTHTCPPCPAPELRRGPSVFLFPPKPKDTLMISRTPEVTCVVVDVSHEDPEVKFNWYVDGVEVHNAKTKPREEQYNSTYRVVSVLTVLHQDWLNGKEYKCKVSNKGLPSSIEKTISKAKGQPREPQVYTLPPSREEMTKNQVSLTCLVKGFYPSDIAVEWESNGQPENNYKTTPPVLDSDGSFFLYSKLTVDKSRWQEGNVFSCSVMHEALHNHYTQKSLSLSP

SEQ ID NO: 1398 - protein, 328 aa, Artificial Sequence
  An artificially synthesized sequence
ASTKGPSVFPLAPSSKSTLLLTAALGCLVKDYFPEPVTVSWNSGALTSGVHTFPAVLQSSGLYSLSSVVTVPSCSVVVQTYICNVNHKPSNTKVDKRVEPKSCDKTHTCPPCPAPELRRGPSVFLFPPKPKDTLMISRTPEVTCVVVDVSHEDPEVKFNWYVDGVEVHNAKTKPREEQYNSTYRVVSVLTVLHQDWLNGKEYKCKVSNKGLPSSIEKTISKAKGQPREPQVYTLPPSREEMTKNQVSLTCLVKGFYPSDIAVEWESNGQPENNYKTTPPVLDSDGSFFLYSKLTVDKSRWQEGNVFSCSVMHEALHNHYTQKSLSLSP

SEQ ID NO: 1399 - protein, 328 aa, Artificial Sequence
  An artificially synthesized sequence
ASTKGPSVFPLAPSSKSTSVVTAALGCLVKDYFPEPVTVSWNSGALTSGVHTFPAVLQSSGLYSLSSVVTVPSCSVVVQTYICNVNHKPSNTKVDKRVEPKSCDKTHTCPPCPAPELRRGPSVFLFPPKPKDTLMISRTPEVTCVVVDVSHEDPEVKFNWYVDGVEVHNAKTKPREEQYNSTYRVVSVLTVLHQDWLNGKEYKCKVSNKGLPSSIEKTISKAKGQPREPQVYTLPPSREEMTKNQVSLTCLVKGFYPSDIAVEWESNGQPENNYKTTPPVLDSDGSFFLYSKLTVDKSRWQEGNVFSCSVMHEALHNHYTQKSLSLSP

SEQ ID NO: 1400 - protein, 328 aa, Artificial Sequence
  An artificially synthesized sequence
ASTKGPSVFPLAPSSKSTVGVTAALGCLVKDYFPEPVTVSWNSGALTSGVHTFPAVLQSSGLYSLSSVVTVPSCSVVVQTYICNVNHKPSNTKVDKRVEPKSCDKTHTCPPCPAPELRRGPSVFLFPPKPKDTLMISRTPEVTCVVVDVSHEDPEVKFNWYVDGVEVHNAKTKPREEQYNSTYRVVSVLTVLHQDWLNGKEYKCKVSNKGLPSSIEKTISKAKGQPREPQVYTLPPSREEMTKNQVSLTCLVKGFYPSDIAVEWESNGQPENNYKTTPPVLDSDGSFFLYSKLTVDKSRWQEGNVFSCSVMHEALHNHYTQKSLSLSP

SEQ ID NO: 1401 - protein, 328 aa, Artificial Sequence
  An artificially synthesized sequence
ASTKGPSVFPLAPSSKSTVVGTAALGCLVKDYFPEPVTVSWNSGALTSGVHTFPAVLQSSGLYSLSSVVTVPSCSVVVQTYICNVNHKPSNTKVDKRVEPKSCDKTHTCPPCPAPELRRGPSVFLFPPKPKDTLMISRTPEVTCVVVDVSHEDPEVKFNWYVDGVEVHNAKTKPREEQYNSTYRVVSVLTVLHQDWLNGKEYKCKVSNKGLPSSIEKTISKAKGQPREPQVYTLPPSREEMTKNQVSLTCLVKGFYPSDIAVEWESNGQPENNYKTTPPVLDSDGSFFLYSKLTVDKSRWQEGNVFSCSVMHEALHNHYTQKSLSLSP

SEQ ID NO: 1402 - protein, 328 aa, Artificial Sequence
  An artificially synthesized sequence
ASTKGPSVFPLAPSSKSTVVVTAALGCLVKDYFPEPVTVSWNSGALTSGVHTFPAVLQSSGLYSLSSVVTVPSCSLVVQTYICNVNHKPSNTKVDKRVEPKSCDKTHTCPPCPAPELRRGPSVFLFPPKPKDTLMISRTPEVTCVVVDVSHEDPEVKFNWYVDGVEVHNAKTKPREEQYNSTYRVVSVLTVLHQDWLNGKEYKCKVSNKGLPSSIEKTISKAKGQPREPQVYTLPPSREEMTKNQVSLTCLVKGFYPSDIAVEWESNGQPENNYKTTPPVLDSDGSFFLYSKLTVDKSRWQEGNVFSCSVMHEALHNHYTQKSLSLSP

SEQ ID NO: 1403 - protein, 328 aa, Artificial Sequence
  An artificially synthesized sequence
ASTKGPSVFPLAPSSKSTVVVTAALGCLVKDYFPEPVTVSWNSGALTSGVHTFPAVLQSSGLYSLSSVVTVPSCSVGVQTYICNVNHKPSNTKVDKRVEPKSCDKTHTCPPCPAPELRRGPSVFLFPPKPKDTLMISRTPEVTCVVVDVSHEDPEVKFNWYVDGVEVHNAKTKPREEQYNSTYRVVSVLTVLHQDWLNGKEYKCKVSNKGLPSSIEKTISKAKGQPREPQVYTLPPSREEMTKNQVSLTCLVKGFYPSDIAVEWESNGQPENNYKTTPPVLDSDGSFFLYSKLTVDKSRWQEGNVFSCSVMHEALHNHYTQKSLSLSP

SEQ ID NO: 1404 - protein, 328 aa, Artificial Sequence
  An artificially synthesized sequence
ASTKGPSVFPLAPSSKSTVVVTAALGCLVKDYFPEPVTVSWNSGALTSGVHTFPAVLQSSGLYSLSSVVTVPSCSVVTQTYICNVNHKPSNTKVDKRVEPKSCDKTHTCPPCPAPELRRGPSVFLFPPKPKDTLMISRTPEVTCVVVDVSHEDPEVKFNWYVDGVEVHNAKTKPREEQYNSTYRVVSVLTVLHQDWLNGKEYKCKVSNKGLPSSIEKTISKAKGQPREPQVYTLPPSREEMTKNQVSLTCLVKGFYPSDIAVEWESNGQPENNYKTTPPVLDSDGSFFLYSKLTVDKSRWQEGNVFSCSVMHEALHNHYTQKSLSLSP

SEQ ID NO: 1405 - protein, 328 aa, Artificial Sequence
  An artificially synthesized sequence
ASTKGPSVFPLAPSSKSTAAATAALGCLVKDYFPEPVTVSWNSGALTSGVHTFPAVLQSSGLYSLSSVVTVPSCSWWWQTYICNVNHKPSNTKVDKRVEPKSCDKTHTCPPCPAPELRRGPSVFLFPPKPKDTLMISRTPEVTCVVVDVSHEDPEVKFNWYVDGVEVHNAKTKPREEQYNSTYRVVSVLTVLHQDWLNGKEYKCKVSNKGLPSSIEKTISKAKGQPREPQVYTLPPSREEMTKNQVSLTCLVKGFYPSDIAVEWESNGQPENNYKTTPPVLDSDGSFFLYSKLTVDKSRWQEGNVFSCSVMHEALHNHYTQKSLSLSP

SEQ ID NO: 1406 - protein, 328 aa, Artificial Sequence
  An artificially synthesized sequence
ASTKGPSVFPLAPSSKSTAAATAALGCLVKDYFPEPVTVSWNSGALTSGVHTFPAVLQSSGLYSLSSVVTVPSCSLLLQTYICNVNHKPSNTKVDKRVEPKSCDKTHTCPPCPAPELRRGPSVFLFPPKPKDTLMISRTPEVTCVVVDVSHEDPEVKFNWYVDGVEVHNAKTKPREEQYNSTYRVVSVLTVLHQDWLNGKEYKCKVSNKGLPSSIEKTISKAKGQPREPQVYTLPPSREEMTKNQVSLTCLVKGFYPSDIAVEWESNGQPENNYKTTPPVLDSDGSFFLYSKLTVDKSRWQEGNVFSCSVMHEALHNHYTQKSLSLSP

SEQ ID NO: 1407 - protein, 328 aa, Artificial Sequence
  An artificially synthesized sequence
ASTKGPSVFPLAPSSKSTAAATAALGCLVKDYFPEPVTVSWNSGALTSGVHTFPAVLQSSGLYSLSSVVTVPSCSVVVQTYICNVNHKPSNTKVDKRVEPKSCDKTHTCPPCPAPELRRGPSVFLFPPKPKDTLMISRTPEVTCVVVDVSHEDPEVKFNWYVDGVEVHNAKTKPREEQYNSTYRVVSVLTVLHQDWLNGKEYKCKVSNKGLPSSIEKTISKAKGQPREPQVYTLPPSREEMTKNQVSLTCLVKGFYPSDIAVEWESNGQPENNYKTTPPVLDSDGSFFLYSKLTVDKSRWQEGNVFSCSVMHEALHNHYTQKSLSLSP

SEQ ID NO: 1408 - protein, 328 aa, Artificial Sequence
  An artificially synthesized sequence
ASTKGPSVFPLAPSSKSTWWWTAALGCLVKDYFPEPVTVSWNSGALTSGVHTFPAVLQSSGLYSLSSVVTVPSCSAAAQTYICNVNHKPSNTKVDKRVEPKSCDKTHTCPPCPAPELRRGPSVFLFPPKPKDTLMISRTPEVTCVVVDVSHEDPEVKFNWYVDGVEVHNAKTKPREEQYNSTYRVVSVLTVLHQDWLNGKEYKCKVSNKGLPSSIEKTISKAKGQPREPQVYTLPPSREEMTKNQVSLTCLVKGFYPSDIAVEWESNGQPENNYKTTPPVLDSDGSFFLYSKLTVDKSRWQEGNVFSCSVMHEALHNHYTQKSLSLSP

SEQ ID NO: 1409 - protein, 328 aa, Artificial Sequence
  An artificially synthesized sequence
ASTKGPSVFPLAPSSKSTSWWTAALGCLVKDYFPEPVTVSWNSGALTSGVHTFPAVLQSSGLYSLSSVVTVPSCSAAAQTYICNVNHKPSNTKVDKRVEPKSCDKTHTCPPCPAPELRRGPSVFLFPPKPKDTLMISRTPEVTCVVVDVSHEDPEVKFNWYVDGVEVHNAKTKPREEQYNSTYRVVSVLTVLHQDWLNGKEYKCKVSNKGLPSSIEKTISKAKGQPREPQVYTLPPSREEMTKNQVSLTCLVKGFYPSDIAVEWESNGQPENNYKTTPPVLDSDGSFFLYSKLTVDKSRWQEGNVFSCSVMHEALHNHYTQKSLSLSP

SEQ ID NO: 1410 - protein, 328 aa, Artificial Sequence
  An artificially synthesized sequence
ASTKGPSVFPLAPSSKSTWGWTAALGCLVKDYFPEPVTVSWNSGALTSGVHTFPAVLQSSGLYSLSSVVTVPSCSAAAQTYICNVNHKPSNTKVDKRVEPKSCDKTHTCPPCPAPELRRGPSVFLFPPKPKDTLMISRTPEVTCVVVDVSHEDPEVKFNWYVDGVEVHNAKTKPREEQYNSTYRVVSVLTVLHQDWLNGKEYKCKVSNKGLPSSIEKTISKAKGQPREPQVYTLPPSREEMTKNQVSLTCLVKGFYPSDIAVEWESNGQPENNYKTTPPVLDSDGSFFLYSKLTVDKSRWQEGNVFSCSVMHEALHNHYTQKSLSLSP

SEQ ID NO: 1411 - protein, 328 aa, Artificial Sequence
  An artificially synthesized sequence
ASTKGPSVFPLAPSSKSTWWGTAALGCLVKDYFPEPVTVSWNSGALTSGVHTFPAVLQSSGLYSLSSVVTVPSCSAAAQTYICNVNHKPSNTKVDKRVEPKSCDKTHTCPPCPAPELRRGPSVFLFPPKPKDTLMISRTPEVTCVVVDVSHEDPEVKFNWYVDGVEVHNAKTKPREEQYNSTYRVVSVLTVLHQDWLNGKEYKCKVSNKGLPSSIEKTISKAKGQPREPQVYTLPPSREEMTKNQVSLTCLVKGFYPSDIAVEWESNGQPENNYKTTPPVLDSDGSFFLYSKLTVDKSRWQEGNVFSCSVMHEALHNHYTQKSLSLSP

SEQ ID NO: 1412 - protein, 328 aa, Artificial Sequence
  An artificially synthesized sequence
ASTKGPSVFPLAPSSKSTWGGTAALGCLVKDYFPEPVTVSWNSGALTSGVHTFPAVLQSSGLYSLSSVVTVPSCSAAAQTYICNVNHKPSNTKVDKRVEPKSCDKTHTCPPCPAPELRRGPSVFLFPPKPKDTLMISRTPEVTCVVVDVSHEDPEVKFNWYVDGVEVHNAKTKPREEQYNSTYRVVSVLTVLHQDWLNGKEYKCKVSNKGLPSSIEKTISKAKGQPREPQVYTLPPSREEMTKNQVSLTCLVKGFYPSDIAVEWESNGQPENNYKTTPPVLDSDGSFFLYSKLTVDKSRWQEGNVFSCSVMHEALHNHYTQKSLSLSP

SEQ ID NO: 1413 - protein, 328 aa, Artificial Sequence
  An artificially synthesized sequence
ASTKGPSVFPLAPSSKSTSWGTAALGCLVKDYFPEPVTVSWNSGALTSGVHTFPAVLQSSGLYSLSSVVTVPSCSAAAQTYICNVNHKPSNTKVDKRVEPKSCDKTHTCPPCPAPELRRGPSVFLFPPKPKDTLMISRTPEVTCVVVDVSHEDPEVKFNWYVDGVEVHNAKTKPREEQYNSTYRVVSVLTVLHQDWLNGKEYKCKVSNKGLPSSIEKTISKAKGQPREPQVYTLPPSREEMTKNQVSLTCLVKGFYPSDIAVEWESNGQPENNYKTTPPVLDSDGSFFLYSKLTVDKSRWQEGNVFSCSVMHEALHNHYTQKSLSLSP

SEQ ID NO: 1414 - protein, 328 aa, Artificial Sequence
  An artificially synthesized sequence
ASTKGPSVFPLAPSSKSTSGWTAALGCLVKDYFPEPVTVSWNSGALTSGVHTFPAVLQSSGLYSLSSVVTVPSCSAAAQTYICNVNHKPSNTKVDKRVEPKSCDKTHTCPPCPAPELRRGPSVFLFPPKPKDTLMISRTPEVTCVVVDVSHEDPEVKFNWYVDGVEVHNAKTKPREEQYNSTYRVVSVLTVLHQDWLNGKEYKCKVSNKGLPSSIEKTISKAKGQPREPQVYTLPPSREEMTKNQVSLTCLVKGFYPSDIAVEWESNGQPENNYKTTPPVLDSDGSFFLYSKLTVDKSRWQEGNVFSCSVMHEALHNHYTQKSLSLSP

SEQ ID NO: 1415 - protein, 328 aa, Artificial Sequence
  An artificially synthesized sequence
ASTKGPSVFPLAPSSKSTLLLTAALGCLVKDYFPEPVTVSWNSGALTSGVHTFPAVLQSSGLYSLSSVVTVPSCSAAAQTYICNVNHKPSNTKVDKRVEPKSCDKTHTCPPCPAPELRRGPSVFLFPPKPKDTLMISRTPEVTCVVVDVSHEDPEVKFNWYVDGVEVHNAKTKPREEQYNSTYRVVSVLTVLHQDWLNGKEYKCKVSNKGLPSSIEKTISKAKGQPREPQVYTLPPSREEMTKNQVSLTCLVKGFYPSDIAVEWESNGQPENNYKTTPPVLDSDGSFFLYSKLTVDKSRWQEGNVFSCSVMHEALHNHYTQKSLSLSP

SEQ ID NO: 1416 - protein, 328 aa, Artificial Sequence
  An artificially synthesized sequence
ASTKGPSVFPLAPSSKSTVVVTAALGCLVKDYFPEPVTVSWNSGALTSGVHTFPAVLQSSGLYSLSSVVTVPSCSAAAQTYICNVNHKPSNTKVDKRVEPKSCDKTHTCPPCPAPELRRGPSVFLFPPKPKDTLMISRTPEVTCVVVDVSHEDPEVKFNWYVDGVEVHNAKTKPREEQYNSTYRVVSVLTVLHQDWLNGKEYKCKVSNKGLPSSIEKTISKAKGQPREPQVYTLPPSREEMTKNQVSLTCLVKGFYPSDIAVEWESNGQPENNYKTTPPVLDSDGSFFLYSKLTVDKSRWQEGNVFSCSVMHEALHNHYTQKSLSLSP

SEQ ID NO: 1417 - protein, 328 aa, Artificial Sequence
  An artificially synthesized sequence
ASTKGPSVFPLAPSSKSTVGGTAALGCLVKDYFPEPVTVSWNSGALTSGVHTFPAVLQSSGLYSLSSVVTVPSCSVVVQTYICNVNHKPSNTKVDKRVEPKSCDKTHTCPPCPAPELRRGPSVFLFPPKPKDTLMISRTPEVTCVVVDVSHEDPEVKFNWYVDGVEVHNAKTKPREEQYNSTYRVVSVLTVLHQDWLNGKEYKCKVSNKGLPSSIEKTISKAKGQPREPQVYTLPPSREEMTKNQVSLTCLVKGFYPSDIAVEWESNGQPENNYKTTPPVLDSDGSFFLYSKLTVDKSRWQEGNVFSCSVMHEALHNHYTQKSLSLSP

SEQ ID NO: 1418 - protein, 328 aa, Artificial Sequence
  An artificially synthesized sequence
ASTKGPSVFPLAPSSKSTSVGTAALGCLVKDYFPEPVTVSWNSGALTSGVHTFPAVLQSSGLYSLSSVVTVPSCSVVVQTYICNVNHKPSNTKVDKRVEPKSCDKTHTCPPCPAPELRRGPSVFLFPPKPKDTLMISRTPEVTCVVVDVSHEDPEVKFNWYVDGVEVHNAKTKPREEQYNSTYRVVSVLTVLHQDWLNGKEYKCKVSNKGLPSSIEKTISKAKGQPREPQVYTLPPSREEMTKNQVSLTCLVKGFYPSDIAVEWESNGQPENNYKTTPPVLDSDGSFFLYSKLTVDKSRWQEGNVFSCSVMHEALHNHYTQKSLSLSP

SEQ ID NO: 1419 - protein, 328 aa, Artificial Sequence
  An artificially synthesized sequence
ASTKGPSVFPLAPSSKSTSGVTAALGCLVKDYFPEPVTVSWNSGALTSGVHTFPAVLQSSGLYSLSSVVTVPSCSVVVQTYICNVNHKPSNTKVDKRVEPKSCDKTHTCPPCPAPELRRGPSVFLFPPKPKDTLMISRTPEVTCVVVDVSHEDPEVKFNWYVDGVEVHNAKTKPREEQYNSTYRVVSVLTVLHQDWLNGKEYKCKVSNKGLPSSIEKTISKAKGQPREPQVYTLPPSREEMTKNQVSLTCLVKGFYPSDIAVEWESNGQPENNYKTTPPVLDSDGSFFLYSKLTVDKSRWQEGNVFSCSVMHEALHNHYTQKSLSLSP

SEQ ID NO: 1420 - protein, 328 aa, Artificial Sequence
  An artificially synthesized sequence
ASTKGPSVFPLAPSSKSTWGGTAALGCLVKDYFPEPVTVSWNSGALTSGVHTFPAVLQSSGLYSLSSVVTVPSCSSVAQTYICNVNHKPSNTKVDKRVEPKSCDKTHTCPPCPAPELRRGPSVFLFPPKPKDTLMISRTPEVTCVVVDVSHEDPEVKFNWYVDGVEVHNAKTKPREEQYNSTYRVVSVLTVLHQDWLNGKEYKCKVSNKGLPSSIEKTISKAKGQPREPQVYTLPPSREEMTKNQVSLTCLVKGFYPSDIAVEWESNGQPENNYKTTPPVLDSDGSFFLYSKLTVDKSRWQEGNVFSCSVMHEALHNHYTQKSLSLSP

SEQ ID NO: 1421 - protein, 328 aa, Artificial Sequence
  An artificially synthesized sequence
ASTKGPSVFPLAPSSKSTSWGTAALGCLVKDYFPEPVTVSWNSGALTSGVHTFPAVLQSSGLYSLSSVVTVPSCSSVAQTYICNVNHKPSNTKVDKRVEPKSCDKTHTCPPCPAPELRRGPSVFLFPPKPKDTLMISRTPEVTCVVVDVSHEDPEVKFNWYVDGVEVHNAKTKPREEQYNSTYRVVSVLTVLHQDWLNGKEYKCKVSNKGLPSSIEKTISKAKGQPREPQVYTLPPSREEMTKNQVSLTCLVKGFYPSDIAVEWESNGQPENNYKTTPPVLDSDGSFFLYSKLTVDKSRWQEGNVFSCSVMHEALHNHYTQKSLSLSP

SEQ ID NO: 1422 - protein, 328 aa, Artificial Sequence
  An artificially synthesized sequence
ASTKGPSVFPLAPSSKSTSGWTAALGCLVKDYFPEPVTVSWNSGALTSGVHTFPAVLQSSGLYSLSSVVTVPSCSSVAQTYICNVNHKPSNTKVDKRVEPKSCDKTHTCPPCPAPELRRGPSVFLFPPKPKDTLMISRTPEVTCVVVDVSHEDPEVKFNWYVDGVEVHNAKTKPREEQYNSTYRVVSVLTVLHQDWLNGKEYKCKVSNKGLPSSIEKTISKAKGQPREPQVYTLPPSREEMTKNQVSLTCLVKGFYPSDIAVEWESNGQPENNYKTTPPVLDSDGSFFLYSKLTVDKSRWQEGNVFSCSVMHEALHNHYTQKSLSLSP

SEQ ID NO: 1423 - protein, 328 aa, Artificial Sequence
  An artificially synthesized sequence
ASTKGPSVFPLAPSSKSTSVATAALGCLVKDYFPEPVTVSWNSGALTSGVHTFPAVLQSSGLYSLSSVVTVPSCSWGTQTYICNVNHKPSNTKVDKRVEPKSCDKTHTCPPCPAPELRRGPSVFLFPPKPKDTLMISRTPEVTCVVVDVSHEDPEVKFNWYVDGVEVHNAKTKPREEQYNSTYRVVSVLTVLHQDWLNGKEYKCKVSNKGLPSSIEKTISKAKGQPREPQVYTLPPSREEMTKNQVSLTCLVKGFYPSDIAVEWESNGQPENNYKTTPPVLDSDGSFFLYSKLTVDKSRWQEGNVFSCSVMHEALHNHYTQKSLSLSP

SEQ ID NO: 1424 - protein, 328 aa, Artificial Sequence
  An artificially synthesized sequence
ASTKGPSVFPLAPSSKSTSVATAALGCLVKDYFPEPVTVSWNSGALTSGVHTFPAVLQSSGLYSLSSVVTVPSCSLWTQTYICNVNHKPSNTKVDKRVEPKSCDKTHTCPPCPAPELRRGPSVFLFPPKPKDTLMISRTPEVTCVVVDVSHEDPEVKFNWYVDGVEVHNAKTKPREEQYNSTYRVVSVLTVLHQDWLNGKEYKCKVSNKGLPSSIEKTISKAKGQPREPQVYTLPPSREEMTKNQVSLTCLVKGFYPSDIAVEWESNGQPENNYKTTPPVLDSDGSFFLYSKLTVDKSRWQEGNVFSCSVMHEALHNHYTQKSLSLSP

SEQ ID NO: 1425 - protein, 328 aa, Artificial Sequence
  An artificially synthesized sequence
ASTKGPSVFPLAPSSKSTSVATAALGCLVKDYFPEPVTVSWNSGALTSGVHTFPAVLQSSGLYSLSSVVTVPSCSLGWQTYICNVNHKPSNTKVDKRVEPKSCDKTHTCPPCPAPELRRGPSVFLFPPKPKDTLMISRTPEVTCVVVDVSHEDPEVKFNWYVDGVEVHNAKTKPREEQYNSTYRVVSVLTVLHQDWLNGKEYKCKVSNKGLPSSIEKTISKAKGQPREPQVYTLPPSREEMTKNQVSLTCLVKGFYPSDIAVEWESNGQPENNYKTTPPVLDSDGSFFLYSKLTVDKSRWQEGNVFSCSVMHEALHNHYTQKSLSLSP

SEQ ID NO: 1426 - protein, 447 aa, Artificial Sequence; identical to SEQ ID NO: 1237
  An artificially synthesized sequence

SEQ ID NO: 1427 - protein, 214 aa, Artificial Sequence [sequence omitted]

SEQ ID NO: 1428 - protein, 447 aa, Artificial Sequence
  An artificially synthesized sequence
QVQLQQSGAELARPGASVKMSCKASGYTFTRYTMHWVKQRPGQGLEWIGYINPSRGYTNYNQKFKDKATLTTDKSSSTAYMQLSSLTSEDSAVYYCARYYDDHYSLDYWGQGTTLTVSSASTKGPSVFPLAPSSKSTSGGTAALGCLVKDYFPEPVTVSWNSGALTSGVHTFPAVLQSSGLYSLSSVVTVPSCSLGTQTYICNVNHKPSNTKVDKRVEPKSCDKTHTCPPCPAPELRRGPSVFLFPPKPKDTLMISRTPEVTCVVVDVSHEDPEVKFNWYVDGVEVHNAKTKPREEQYNSTYRVVSVLTVLHQDWLNGKEYKCKVSNKGLPSSIEKTISKAKGQPREPQVYTLPPSREEMTKNQVSLTCLVKGFYPSDIAVEWESNGQPENNYKTTPPVLDSDGSFFLYSKLTVDKSRWQEGNVFSCSVMHEALHNHYTQKSLSLSP

SEQ ID NO: 1429 - protein, 447 aa, Artificial Sequence
  An artificially synthesized sequence
QVQLQQSGAELARPGASVKMSCKASGYTFTRYTMHWVKQRPGQGLEWIGYINPSRGYTNYNQKFKDKATLTTDKSSSTAYMQLSSLTSEDSAVYYCARYYDDHYSLDYWGQGTTLTVSSASTKGPSVFPLAPSSKSTSKKTAALGCLVKDYFPEPVTVSWNSGALTSGVHTFPAVLQSSGLYSLSSVVTVPSCSLEEQTYICNVNHKPSNTKVDKRVEPKSCDKTHTCPPCPAPELRRGPSVFLFPPKPKDTLMISRTPEVTCVVVDVSHEDPEVKFNWYVDGVEVHNAKTKPREEQYNSTYRVVSVLTVLHQDWLNGKEYKCKVSNKGLPSSIEKTISKAKGQPREPQVYTLPPSREEMTKNQVSLTCLVKGFYPSDIAVEWESNGQPENNYKTTPPVLDSDGSFFLYSKLTVDKSRWQEGNVFSCSVMHEALHNHYTQKSLSLSP

1. A method for producing an antibody preparation, said method comprising contacting an antibody solution with a reducing reagent, wherein the antibody solution comprises a first antigen-binding domain and a second antigen-binding domain which are capable of being linked with each other via at least one disulfide bond, wherein said first antigen-binding domain and said second antigen-binding domain comprises a CH1 region, a CL region, a VL region, a VH region and/or a VHH region, and wherein said at least one disulfide bond is capable of being formed between amino acid residues which are not in a hinge region.

2. The method of claim 1, wherein the produced antibody preparation comprises two antibody structural isoforms which differ by at least one disulfide bond formed between amino acid residues which are not in a hinge region.

3. The method of claim 1, wherein said method preferentially enriches or increases the population of an antibody structural isoform having at least one disulfide bond formed between amino acid residues which are not in a hinge region.

4. The method of claim 1, wherein said at least one disulfide bond is an interchain disulfide bond.

5. The method of claim 1, wherein said at least one disulfide bond is formed between a CH1 region, a CL region, a VL region, a VH region and/or a VHH region of the first antigen-binding domain and the second antigen-binding domain.

6. The method of claim 1, wherein said at least one disulfide bond is formed between a CH1 region of the first antigen-binding domain and a CH1 region of the second antigen-binding domain.

7. The method of claim 6, wherein said at least one disulfide bond is formed between the amino acid residues at position 191 according to EU numbering in the respective CH1 regions of the first antigen-binding domain and the second antigen-binding domain.

8. The method of claim 1, wherein said antibody is an IgG antibody.

9. The method of claim 1, wherein the pH of said reducing reagent is from about 3 to about 10.

10. The method of claim 1, wherein the reducing agent is selected from the group consisting of tris(2-carboxyethyl)phosphine (TCEP), 2-aminoethanethiol (2-MEA), dithiothreitol (DTT), Cysteine, glutathione (GSH) and Na₂SO₃.

11. The method of claim 1, wherein the contacting step is performed for at least 30 minutes.

12. The method of claim 1, wherein the contacting step is performed at a temperature of about 20 degrees Celsius to 37 degrees Celsius.

13. The method of claim 1, wherein the concentration of the produced antibody is from about 1 mg/ml to about 50 mg/ml.

14. The method of claim 1, wherein said first antigen-binding domain and/or said second antigen-binding domain is partially purified by affinity chromatography prior to said contacting with the reducing agent.

15. The method of claim 1, further comprising a step of removing or chemically inactivating the reducing agent.

16. The method of claim 8, wherein said antibody is an IgG1, IgG2, IgG3 or IgG4 antibody.

17. The method of claim 12, wherein the contacting step is performed at a temperature of about 23 degrees Celsius, about 25 degrees Celsius, or about 37 degrees Celsius.

18. The method of claim 15, wherein the reducing agent is removed by dialysis or a chromatography method.

19. The method of claim 1, further comprising a step of purifying the produced antibodies.

20. The method of claim 2, further comprising a step of separating the structural antibody isoforms.

21. An antibody produced according to the method of claim 1.
